(19) United States
(12) Patent Application Publication
(10) Pub. No.: US 2020/0369746 A1
(43) Pub. Date: Nov. 26, 2020

(54) ENGINEERED TRANSFERRIN RECEPTOR BINDING POLYPEPTIDES

(71) Applicant: Denali Therapeutics Inc., South San Francisco, CA (US)

(72) Inventors: Xiaocheng Chen, South San Francisco, CA (US); Mark S. Dennis, South San Francisco, CA (US); Mihalis Kariolis, South San Francisco, CA (US); Adam P. Silverman, South San Francisco, CA (US); Ankita Srivastava, South San Francisco (US); Ryan J. Watts, South San Francisco, CA (US); Robert C. Wells, South San Francisco, CA (US); Joy Yu Zuchero, South San Francisco, CA (US)

(73) Assignee: Denali Therapeutics Inc., South San Francisco, CA (US)

(21) Appl. No.: 16/782,669

(22) Filed: Feb. 5, 2020

Related U.S. Application Data
(63) Continuation of application No. PCT/US2018/046199, filed on Aug. 10, 2018.
(60) Provisional application No. 62/543,658, filed on Aug. 10, 2017.
(60) Provisional application No. 62/583,314, filed on Nov. 8, 2017.

(30) Foreign Application Priority Data
Feb. 15, 2018 (US) PCT/US2018/018371

(51) Int. Cl. C07K 14/79

(52) U.S. Cl. CPC C07K 14/79; A61K 38/00; C07K 2317/55; C07K 2317/52

(57) ABSTRACT

Provided herein are polypeptides that bind to a transferrin receptor, Fc dimers and fusion proteins comprising such polypeptides, and methods of using the polypeptides to target a composition to a transferrin receptor-expressing cell.

### CROSS-REFERENCE TO RELATED APPLICATIONS

[0001] The present application is a continuation of International Patent Application No. PCT/US2018/046199, filed Aug. 10, 2018, which claims priority to U.S. Provisional Patent Application No. 62/543,658, filed on Aug. 10, 2017, U.S. Provisional Patent Application No. 62/583,314, filed on Nov. 8, 2017, and International Patent Application No. PCT/US2018/018371, filed on Feb. 15, 2018, the disclosures of which are incorporated herein by reference in their entirety for all purposes.

### BACKGROUND

[0002] Various techniques have been developed that engineer a protein to bind to a target that it does not normally bind. For example, libraries can be generated to screen for engineered proteins with desired binding or enzymatic activity.

[0003] Transferrin receptor is a carrier protein for transferrin that, among other functions, is needed for the import of iron into the cell and is regulated in response to intracellular iron concentration. Transferrin receptors are expressed on endothelia, including the endothelium of the blood-brain barrier, and are expressed at increased levels on various cancer cells and inflammatory cells. It is one of the receptors that mediates transcytosis of cognate ligands across the blood-brain barrier. Transferrin receptors can thus be desirable targets for introducing an agent into a cell for either endocytosis in the cell or transcytosis across the cell.

### BRIEF SUMMARY

[0004] We have developed polypeptides that include CH3 domains that are capable of binding a transferrin receptor (TfR). These polypeptides have been engineered with substitutions in the CH3 domain that generate a novel TfR binding site. TfR is highly expressed on the blood-brain barrier (BBB), and TfR naturally moves transferrin from the blood into the brain. Because these polypeptides bind TfR, they too can be transported across the BBB and further can be used to transport attached therapeutic agents (e.g., therapeutic polypeptides, antibody variable regions such as Fabs, and small molecules) across the BBB. This approach can substantially improve brain uptake of the therapeutic agents and is therefore highly useful for treating disorders and diseases where brain delivery is advantageous.

[0005] In one aspect, the disclosure features a polypeptide that specifically binds to a transferrin receptor, comprising a sequence having at least 85%, 90%, or 95% sequence identity to the sequence of any one of SEQ ID NOS:83, 84, 191, 43, and 82, wherein the polypeptide comprises Glu at position 153, Tyr or Phe at position 157, Thr at position 159, Glu at position 160, Trp at position 161, Val, Ser, or Ala at position 162, Asn at position 163, Thr or Ser at position 186, Glu at position 188, Glu at position 189, and Phe at position 194, as numbered with reference to SEQ ID NO:1.

[0006] In some embodiments, the polypeptide further comprises Trp at position 139, as numbered with reference to SEQ ID NO:1. In some embodiments, the polypeptide further comprises Ala at position 7, Ala at position 8, and Trp at position 139, as numbered with reference to SEQ ID NO:1. In some embodiments, the polypeptide further comprises Ala at position 7, Ala at position 8, Trp at position 139, Leu at position 201, and Ser at position 207, as numbered with reference to SEQ ID NO:1. In some embodiments, the polypeptide further comprises Ser at position 139, Ala at position 141, and Val at position 180, as numbered with reference to SEQ ID NO:1. In some embodiments, the polypeptide further comprises Ala at position 7, Ala at position 8, Ser at position 139, Ala at position 141, and Val at position 180, as numbered with reference to SEQ ID NO:1. In some embodiments, the polypeptide further comprises Ala at position 7, Ala at position 8, Ser at position 139, Ala at position 141, Val at position 180, Leu at position 201, and Ser at position 207, as numbered with reference to SEQ ID NO:1.

[0007] In some embodiments, the polypeptide does not comprise the first three amino acids “PCP” at the amino-terminal end of the sequence (e.g., the polypeptide comprises a sequence having at least 85%, 90%, or 95% sequence identity to the sequence of any one of SEQ ID NOS:83, 84, 191, 43, and 82 without the first three amino acids “PCP” at the amino-terminal end).

[0008] In some embodiments, the polypeptide further comprises an antibody heavy chain variable region.

[0009] In another aspect, the disclosure features a polypeptide that specifically binds to a transferrin receptor, comprising a sequence having at least 85%, 90%, or 95% sequence identity to the sequence of SEQ ID NO:83, wherein the polypeptide comprises Glu at position 153, Tyr at position 157, Thr at position 159, Glu at position 160, Trp at position 161, Val at position 162, Asn at position 163, Thr at position 186, Glu at position 188, Glu at position 189, and Phe at position 194, as numbered with reference to SEQ ID NO:1.

[0010] In some embodiments, the polypeptide further comprises Trp at position 139, as numbered with reference to SEQ ID NO: 1. In certain embodiments, the polypeptide comprises the sequence of SEQ ID NO:133.

[0011] In some embodiments, the polypeptide further comprises Ala at position 7, Ala at position 8, and Trp at position 139, as numbered with reference to SEQ ID NO:1. In certain embodiments, the polypeptide comprises the sequence of SEQ ID NO:134.

[0012] In some embodiments, the polypeptide further comprises Ala at position 7, Ala at position 8, Trp at position 139, Leu at position 201, and Ser at position 207, as numbered with reference to SEQ ID NO:1. In certain embodiments, the polypeptide comprises the sequence of SEQ ID NO:260.

[0013] In some embodiments, the polypeptide further comprises Ser at position 139, Ala at position 141, and Val at position 180, as numbered with reference to SEQ ID NO:1. In certain embodiments, the polypeptide comprises the sequence of SEQ ID NO:139.

[0014] In some embodiments, the polypeptide further comprises Ala at position 7, Ala at position 8, Ser at position 139, Ala at position 141, and Val at position 180, as numbered with reference to SEQ ID NO:1. In certain embodiments, the polypeptide comprises the sequence of SEQ ID NO:140.

[0015] In some embodiments, the polypeptide further comprises Ala at position 7, Ala at position 8, Ser at position 139, Ala at position 141, Val at position 180, Leu at position 201, and Ser at position 207, as numbered with reference to SEQ ID NO:1. In certain embodiments, the polypeptide comprises the sequence of SEQ ID NO:263.

[0016] In some embodiments, the polypeptide does not comprise the first three amino acids “PCP” at the amino-terminal end of the sequence (e.g., the polypeptide comprises a sequence having at least 85%, 90%, or 95% sequence identity to the sequence of any one of SEQ ID NOS:83, 133, 134, 260, 139, 140, and 263 without the first three amino acids “PCP” at the amino-terminal end).

[0017] In some embodiments, the polypeptide further comprises an antibody heavy chain variable region.

[0018] In another aspect, the disclosure features a polypeptide that specifically binds to a transferrin receptor, comprising a sequence having at least 85%, 90%, or 95% sequence identity to the sequence of SEQ ID NO:84, wherein the polypeptide comprises Glu at position 153, Tyr at position 157, Thr at position 159, Glu at position 160, Trp at position 161, Ser at position 162, Asn at position 163, Ser at position 186, Glu at position 188, Glu at position 189, and Phe at position 194, as numbered with reference to SEQ ID NO:1.

[0019] In some embodiments, the polypeptide further comprises Trp at position 139, as numbered with reference to SEQ ID NO:1. In certain embodiments, the polypeptide comprises the sequence of SEQ ID NO:145.

[0020] In some embodiments, the polypeptide further comprises Ala at position 7, Ala at position 8, and Trp at position 139, as numbered with reference to SEQ ID NO:1. In certain embodiments, the polypeptide comprises the sequence of SEQ ID NO:146.

[0021] In some embodiments, the polypeptide further comprises Ala at position 7, Ala at position 8, Trp at position 139, Leu at position 201, and Ser at position 207, as numbered with reference to SEQ ID NO:1. In certain embodiments, the polypeptide comprises the sequence of SEQ ID NO:267.

[0022] In some embodiments, the polypeptide further comprises Ser at position 139, Ala at position 141, and Val at position 180, as numbered with reference to SEQ ID NO:1. In certain embodiments, the polypeptide comprises the sequence of SEQ ID NO:151.

[0023] In some embodiments, the polypeptide further comprises Ala at position 7, Ala at position 8, Ser at position 139, Ala at position 141, and Val at position 180, as numbered with reference to SEQ ID NO:1. In certain embodiments, the polypeptide comprises the sequence of SEQ ID NO:152.

[0024] In some embodiments, the polypeptide further comprises Ala at position 7, Ala at position 8, Ser at position 139, Ala at position 141, Val at position 180, Leu at position 201, and Ser at position 207, as numbered with reference to SEQ ID NO:1. In certain embodiments, the polypeptide comprises the sequence of SEQ ID NO:270.

[0025] In some embodiments, the polypeptide does not comprise the first three amino acids “PCP” at the amino-terminal end of the sequence (e.g., the polypeptide comprises a sequence having at least 85%, 90%, or 95% sequence identity to the sequence of any one of SEQ ID NOS:84, 145, 146, 267, 151, 152, and 270 without the first three amino acids “PCP” at the amino-terminal end).

[0026] In some embodiments, the polypeptide further comprises an antibody heavy chain variable region.

[0027] In another aspect, the disclosure features a polypeptide that specifically binds to a transferrin receptor, comprising a sequence having at least 85%, 90%, or 95% sequence identity to the sequence of SEQ ID NO:191, wherein the polypeptide comprises Glu at position 153, Phe at position 157, Thr at position 159, Glu at position 160, Trp at position 161, Ser at position 162, Asn at position 163, Ser at position 186, Glu at position 188, Glu at position 189, and Phe at position 194, as numbered with reference to SEQ ID NO:1.

[0028] In some embodiments, the polypeptide further comprises Trp at position 139, as numbered with reference to SEQ ID NO:1. In certain embodiments, the polypeptide comprises the sequence of SEQ ID NO:232.

[0029] In some embodiments, the polypeptide further comprises Ala at position 7, Ala at position 8, and Trp at position 139, as numbered with reference to SEQ ID NO:1. In certain embodiments, the polypeptide comprises the sequence of SEQ ID NO:233.

[0030] In some embodiments, the polypeptide further comprises Ala at position 7, Ala at position 8, Trp at position 139, Leu at position 201, and Ser at position 207, as numbered with reference to SEQ ID NO:1. In certain embodiments, the polypeptide comprises the sequence of SEQ ID NO:309.

[0031] In some embodiments, the polypeptide further comprises Ser at position 139, Ala at position 141, and Val at position 180, as numbered with reference to SEQ ID NO:1. In certain embodiments, the polypeptide comprises the sequence of SEQ ID NO:238.

[0032] In some embodiments, the polypeptide further comprises Ala at position 7, Ala at position 8, Ser at position 139, Ala at position 141, and Val at position 180, as numbered with reference to SEQ ID NO:1. In certain embodiments, the polypeptide comprises the sequence of SEQ ID NO:239.

[0033] In some embodiments, the polypeptide further comprises Ala at position 7, Ala at position 8, Ser at position 139, Ala at position 141, Val at position 180, Leu at position 201, and Ser at position 207, as numbered with reference to SEQ ID NO:1. In certain embodiments, the polypeptide comprises the sequence of SEQ ID NO:312.

[0034] In some embodiments, the polypeptide does not comprise the first three amino acids “PCP” at the amino-terminal end of the sequence (e.g., the polypeptide comprises a sequence having at least 85%, 90%, or 95% sequence identity to the sequence of any one of SEQ ID NOS:191, 232, 233, 309, 238, 239, and 312 without the first three amino acids “PCP” at the amino-terminal end).

[0035] In some embodiments, the polypeptide further comprises an antibody heavy chain variable region.

[0036] In another aspect, the disclosure features a polypeptide that specifically binds to a transferrin receptor, comprising a sequence having at least 85%, 90%, or 95% sequence identity to the sequence of SEQ ID NO:43, wherein the polypeptide comprises Glu at position 153, Tyr at position 157, Thr at position 159, Glu at position 160, Trp at position 161, Ser at position 162, Asn at position 163, Thr at position 186, Glu at position 188, Glu at position 189, and Phe at position 194, as numbered with reference to SEQ ID NO:1.

[0037] In some embodiments, the polypeptide further comprises Trp at position 139, as numbered with reference to SEQ ID NO:1. In certain embodiments, the polypeptide comprises the sequence of SEQ ID NO:169.

[0038] In some embodiments, the polypeptide further comprises Ala at position 7, Ala at position 8, and Trp at position 139, as numbered with reference to SEQ ID NO:1. In certain embodiments, the polypeptide comprises the sequence of SEQ ID NO:170.

[0039] In some embodiments, the polypeptide further comprises Ala at position 7, Ala at position 8, Trp at position 139, Leu at position 201, and Ser at position 207, as numbered with reference to SEQ ID NO:1. In certain embodiments, the polypeptide comprises the sequence of SEQ ID NO:281.

[0040] In some embodiments, the polypeptide further comprises Ser at position 139, Ala at position 141, and Val at position 180, as numbered with reference to SEQ ID NO:1. In certain embodiments, the polypeptide comprises the sequence of SEQ ID NO:175.

[0041] In some embodiments, the polypeptide further comprises Ala at position 7, Ala at position 8, Ser at position 139, Ala at position 141, and Val at position 180, as numbered with reference to SEQ ID NO:1. In certain embodiments, the polypeptide comprises the sequence of SEQ ID NO:176.

[0042] In some embodiments, the polypeptide further comprises Ala at position 7, Ala at position 8, Ser at position 139, Ala at position 141, Val at position 180, Leu at position 201, and Ser at position 207, as numbered with reference to SEQ ID NO:1. In certain embodiments, the polypeptide comprises the sequence of SEQ ID NO:284.

[0043] In some embodiments, the polypeptide does not comprise the first three amino acids “PCP” at the amino-terminal end of the sequence (e.g., the polypeptide comprises a sequence having at least 85%, 90%, or 95% sequence identity to the sequence of any one of SEQ ID NOS:43, 169, 170, 281, 175, 176, and 284 without the first three amino acids “PCP” at the amino-terminal end).

[0044] In some embodiments, the polypeptide further comprises an antibody heavy chain variable region.

[0045] In another aspect, the disclosure features a polypeptide that specifically binds to a transferrin receptor, comprising a sequence having at least 85%, 90%, or 95% sequence identity to the sequence of SEQ ID NO:82, wherein the polypeptide comprises Glu at position 153, Tyr at position 157, Thr at position 159, Glu at position 160, Trp at position 161, Ala at position 162, Asn at position 163, Thr at position 186, Glu at position 188, Glu at position 189, and Phe at position 194, as numbered with reference to SEQ ID NO:1.

[0046] In some embodiments, the polypeptide further comprises Trp at position 139, as numbered with reference to SEQ ID NO:1. In certain embodiments, the polypeptide comprises the sequence of SEQ ID NO:121.

[0047] In some embodiments, the polypeptide further comprises Ala at position 7, Ala at position 8, and Trp at position 139, as numbered with reference to SEQ ID NO:1. In certain embodiments, the polypeptide comprises the sequence of SEQ ID NO:122.

[0048] In some embodiments, the polypeptide further comprises Ala at position 7, Ala at position 8, Trp at position 139, Leu at position 201, and Ser at position 207, as numbered with reference to SEQ ID NO:1. In certain embodiments, the polypeptide comprises the sequence of SEQ ID NO:253.

[0049] In some embodiments, the polypeptide further comprises Ser at position 139, Ala at position 141, and Val at position 180, as numbered with reference to SEQ ID NO:1. In certain embodiments, the polypeptide comprises the sequence of SEQ ID NO:127.

[0050] In some embodiments, the polypeptide further comprises Ala at position 7, Ala at position 8, Ser at position 139, Ala at position 141, and Val at position 180, as numbered with reference to SEQ ID NO:1. In certain embodiments, the polypeptide comprises the sequence of SEQ ID NO:128.

[0051] In some embodiments, the polypeptide further comprises Ala at position 7, Ala at position 8, Ser at position 139, Ala at position 141, Val at position 180, Leu at position 201, and Ser at position 207, as numbered with reference to SEQ ID NO:1. In certain embodiments, the polypeptide comprises the sequence of SEQ ID NO:256.

[0052] In some embodiments, the polypeptide does not comprise the first three amino acids “PCP” at the amino-terminal end of the sequence (e.g., the polypeptide comprises a sequence having at least 85%, 90%, or 95% sequence identity to the sequence of any one of SEQ ID NOS:82, 121, 122, 253, 127, 128, and 256 without the first three amino acids “PCP” at the amino-terminal end).

[0053] In some embodiments, the polypeptide further comprises an antibody heavy chain variable region.

[0054] In another aspect, the disclosure features a polypeptide that specifically binds to a transferrin receptor, comprising the sequence of SEQ ID NO:347. In another aspect, the disclosure features a polypeptide that specifically binds to a transferrin receptor, comprising the sequence of SEQ ID NO:348. In some embodiments, the polypeptide further comprises an antibody heavy chain variable region.

[0055] In another aspect, the disclosure features a polypeptide comprising from N- to C-terminus: an antibody heavy chain variable region, a CH1 domain, a hinge region, and a polypeptide described herein.

[0056] In another aspect, the disclosure features an Fc polypeptide dimer, or a dimeric fragment thereof, comprising:
[0057] (a) a first Fc polypeptide comprising a polypeptide described herein; and
[0058] (b) a second Fc polypeptide capable of dimerizing with the first Fc polypeptide of (a).

[0059] In some embodiments, the dimer is monovalent for TfR binding. In some embodiments, the second Fc polypeptide comprises the sequence of any one of SEQ ID NOS:351-356.

[0060] In certain embodiments, the first Fc polypeptide comprises the sequence of any one of SEQ ID NOS:133, 134, and 260; and the second Fc polypeptide comprises the sequence of any one of SEQ ID NOS:354-356.

[0061] In certain embodiments, the first Fc polypeptide comprises the sequence of any one of SEQ ID NOS:145, 146, and 267; and the second Fc polypeptide comprises the sequence of any one of SEQ ID NOS:354-356.

[0062] In certain embodiments, the first Fc polypeptide comprises the sequence of any one of SEQ ID NOS:232, 233, and 309; and the second Fc polypeptide comprises the sequence of any one of SEQ ID NOS:354-356.

[0063] In certain embodiments, the first Fc polypeptide comprises the sequence of any one of SEQ ID NOS:169, 170, and 281; and the second Fc polypeptide comprises the sequence of any one of SEQ ID NOS:354-356.

[0064] In certain embodiments, the first Fc polypeptide comprises the sequence of any one of SEQ ID NOS:121, 122, and 253; and the second Fc polypeptide comprises the sequence of any one of SEQ ID NOS:354-356.

[0065] In certain embodiments, the first Fc polypeptide comprises the sequence of any one of SEQ ID NOS:139, 140, and 263; and the second Fc polypeptide comprises the sequence of any one of SEQ ID NOS:351-353.

[0066] In certain embodiments, the first Fc polypeptide comprises the sequence of any one of SEQ ID NOS:151, 152, and 270; and the second Fc polypeptide comprises the sequence of any one of SEQ ID NOS:351-353.

[0067] In certain embodiments, the first Fc polypeptide comprises the sequence of any one of SEQ ID NOS:238, 239, and 312; and the second Fc polypeptide comprises the sequence of any one of SEQ ID NOS:351-353.

[0068] In certain embodiments, the first Fc polypeptide comprises the sequence of any one of SEQ ID NOS:175, 176, and 284; and the second Fc polypeptide comprises the sequence of any one of SEQ ID NOS:351-353.

[0069] In certain embodiments, the first Fc polypeptide comprises the sequence of any one of SEQ ID NOS:127, 128, and 256; and the second Fc polypeptide comprises the sequence of any one of SEQ ID NOS:351-353.

[0070] In certain embodiments, the first and second Fc polypeptides in the dimer comprise the following sequences:
[0071] (a) the first Fc polypeptide comprises the sequence of SEQ ID NO:134 and the second Fc polypeptide comprises the sequence of SEQ ID NO:355; or
[0072] (b) the first Fc polypeptide comprises the sequence of SEQ ID NO:134 and the second Fc polypeptide comprises the sequence of SEQ ID NO:356; or
[0073] (c) the first Fc polypeptide comprises the sequence of SEQ ID NO:260 and the second Fc polypeptide comprises the sequence of SEQ ID NO:355; or
[0074] (d) the first Fc polypeptide comprises the sequence of SEQ ID NO:260 and the second Fc polypeptide comprises the sequence of SEQ ID NO:356; or
[0075] (e) the first Fc polypeptide comprises the sequence of SEQ ID NO:140 and the second Fc polypeptide comprises the sequence of SEQ ID NO:352; or
[0076] (f) the first Fc polypeptide comprises the sequence of SEQ ID NO:140 and the second Fc polypeptide comprises the sequence of SEQ ID NO:353; or
[0077] (g) the first Fc polypeptide comprises the sequence of SEQ ID NO:263 and the second Fc polypeptide comprises the sequence of SEQ ID NO:352; or
[0078] (h) the first Fc polypeptide comprises the sequence of SEQ ID NO:263 and the second Fc polypeptide comprises the sequence of SEQ ID NO:353.

[0079] In certain embodiments, the first and second Fc polypeptides in the dimer comprise the following sequences:
[0080] (a) the first Fc polypeptide comprises the sequence of SEQ ID NO:146 and the second Fc polypeptide comprises the sequence of SEQ ID NO:355; or
[0081] (b) the first Fc polypeptide comprises the sequence of SEQ ID NO:146 and the second Fc polypeptide comprises the sequence of SEQ ID NO:356; or
[0082] (c) the first Fc polypeptide comprises the sequence of SEQ ID NO:267 and the second Fc polypeptide comprises the sequence of SEQ ID NO:355; or
[0083] (d) the first Fc polypeptide comprises the sequence of SEQ ID NO:267 and the second Fc polypeptide comprises the sequence of SEQ ID NO:356; or
[0084] (e) the first Fc polypeptide comprises the sequence of SEQ ID NO:152 and the second Fc polypeptide comprises the sequence of SEQ ID NO:352; or
[0085] (f) the first Fc polypeptide comprises the sequence of SEQ ID NO:152 and the second Fc polypeptide comprises the sequence of SEQ ID NO:353; or
[0086] (g) the first Fc polypeptide comprises the sequence of SEQ ID NO:270 and the second Fc polypeptide comprises the sequence of SEQ ID NO:352; or
[0087] (h) the first Fc polypeptide comprises the sequence of SEQ ID NO:270 and the second Fc polypeptide comprises the sequence of SEQ ID NO:353.

[0088] In certain embodiments, the first and second Fc polypeptides in the dimer comprise the following sequences:
[0089] (a) the first Fc polypeptide comprises the sequence of SEQ ID NO:233 and the second Fc polypeptide comprises the sequence of SEQ ID NO:355; or
[0090] (b) the first Fc polypeptide comprises the sequence of SEQ ID NO:233 and the second Fc polypeptide comprises the sequence of SEQ ID NO:356; or
[0091] (c) the first Fc polypeptide comprises the sequence of SEQ ID NO:309 and the second Fc polypeptide comprises the sequence of SEQ ID NO:355; or
[0092] (d) the first Fc polypeptide comprises the sequence of SEQ ID NO:309 and the second Fc polypeptide comprises the sequence of SEQ ID NO:356; or
[0093] (e) the first Fc polypeptide comprises the sequence of SEQ ID NO:239 and the second Fc polypeptide comprises the sequence of SEQ ID NO:352; or
[0094] (f) the first Fc polypeptide comprises the sequence of SEQ ID NO:239 and the second Fc polypeptide comprises the sequence of SEQ ID NO:353; or
[0095] (g) the first Fc polypeptide comprises the sequence of SEQ ID NO:312 and the second Fc polypeptide comprises the sequence of SEQ ID NO:352; or
[0096] (h) the first Fc polypeptide comprises the sequence of SEQ ID NO:312 and the second Fc polypeptide comprises the sequence of SEQ ID NO:353.

[0097] In certain embodiments, the first and second Fc polypeptides in the dimer comprise the following sequences:
[0098] (a) the first Fc polypeptide comprises the sequence of SEQ ID NO:170 and the second Fc polypeptide comprises the sequence of SEQ ID NO:355; or
[0099] (b) the first Fc polypeptide comprises the sequence of SEQ ID NO:170 and the second Fc polypeptide comprises the sequence of SEQ ID NO:356; or
[0100] (c) the first Fc polypeptide comprises the sequence of SEQ ID NO:281 and the second Fc polypeptide comprises the sequence of SEQ ID NO:355; or
[0101] (d) the first Fc polypeptide comprises the sequence of SEQ ID NO:281 and the second Fc polypeptide comprises the sequence of SEQ ID NO:356; or
[0102] (e) the first Fc polypeptide comprises the sequence of SEQ ID NO:176 and the second Fc polypeptide comprises the sequence of SEQ ID NO:352; or
[0103] (f) the first Fc polypeptide comprises the sequence of SEQ ID NO:176 and the second Fc polypeptide comprises the sequence of SEQ ID NO:353; or
[0104] (g) the first Fc polypeptide comprises the sequence of SEQ ID NO:284 and the second Fc polypeptide comprises the sequence of SEQ ID NO:352; or
[0105] (h) the first Fc polypeptide comprises the sequence of SEQ ID NO:284 and the second Fc polypeptide comprises the sequence of SEQ ID NO:353.

[0106] In certain embodiments, the first and second Fc polypeptides in the dimer comprise the following sequences:
[0107] (a) the first Fc polypeptide comprises the sequence of SEQ ID NO:122 and the second Fc polypeptide comprises the sequence of SEQ ID NO:355; or
[0108] (b) the first Fc polypeptide comprises the sequence of SEQ ID NO:122 and the second Fc polypeptide comprises the sequence of SEQ ID NO:356; or
[0109] (c) the first Fc polypeptide comprises the sequence of SEQ ID NO:253 and the second Fc polypeptide comprises the sequence of SEQ ID NO:355; or
[0110] (d) the first Fc polypeptide comprises the sequence of SEQ ID NO:253 and the second Fc polypeptide comprises the sequence of SEQ ID NO:356; or
[0111] (e) the first Fc polypeptide comprises the sequence of SEQ ID NO:128 and the second Fc polypeptide comprises the sequence of SEQ ID NO:352; or
[0112] (f) the first Fc polypeptide comprises the sequence of SEQ ID NO:128 and the second Fc polypeptide comprises the sequence of SEQ ID NO:353; or
[0113] (g) the first Fc polypeptide comprises the sequence of SEQ ID NO:256 and the second Fc polypeptide comprises the sequence of SEQ ID NO:352; or
[0114] (h) the first Fc polypeptide comprises the sequence of SEQ ID NO:256 and the second Fc polypeptide comprises the sequence of SEQ ID NO:353.

[0115] In some embodiments, the first Fc polypeptide does not comprise the first three amino acids “PCP” at the amino-terminal end of the sequence (e.g., the first Fc polypeptide comprises the sequence without the first three amino acids “PCP” at the amino-terminal end).

[0116] In certain embodiments, the first Fc polypeptide comprises the sequence of SEQ ID NO:347 and the second Fc polypeptide comprises the sequence of SEQ ID NO:350. In certain embodiments, the first Fc polypeptide comprises the sequence of SEQ ID NO:348 and the second Fc polypeptide comprises the sequence of SEQ ID NO:349.

[0117] In some embodiments, the dimer is bivalent for TfR binding. In some embodiments, the second Fc polypeptide comprises the sequence of SEQ ID NO:347 or 348. In certain embodiments, the first Fc polypeptide comprises the sequence of SEQ ID NO:347 and the second Fc polypeptide comprises the sequence of SEQ ID NO:348. In some embodiments, the first and second Fc polypeptides comprise the same TfR binding site.

[0118] In another aspect, the disclosure features an Fc polypeptide dimer-Fab fusion protein comprising:
[0119] (a) an antibody variable region that is capable of binding an antigen, or antigen-binding fragment thereof; and
[0120] (b) an Fc polypeptide dimer described herein.

[0121] In some embodiments, the antibody variable region forms part of a Fab domain. In certain embodiments, the antibody variable region comprises two antibody heavy chain variable regions and two antibody light chain variable regions, or respective fragments thereof.

[0122] In another aspect, the disclosure features a polynucleotide comprising a nucleic acid sequence encoding a polypeptide described herein. In some embodiments, a vector comprising the polynucleotide is provided. In some embodiments, a host cell comprising the polynucleotide is provided. In another aspect, the disclosure features a method for producing a polypeptide that specifically binds to a transferrin receptor, comprising culturing a host cell under conditions in which a polypeptide encoded by the polynucleotide is expressed.

[0123] In another aspect, the disclosure features a pharmaceutical composition comprising: a polypeptide, Fc polypeptide dimer, and/or Fc polypeptide dimer-Fab fusion protein described herein; and a pharmaceutically acceptable carrier.

[0124] In another aspect, the disclosure features a method for transcytosis of a composition across an endothelium, the method comprising contacting the endothelium with a composition comprising a polypeptide, Fc polypeptide dimer, and/or Fc polypeptide dimer-Fab fusion protein described herein.

[0125] In some embodiments, the endothelium is the blood-brain barrier (BBB).

### BRIEF DESCRIPTION OF THE DRAWINGS

[0126] FIG. 1 shows FACS plots for CH3C clone selections on yeast, showing enrichment of binding population after 3 sort rounds. In sort rounds 1 and 2, biotinylated TfR was pre-loaded on streptavidin-Alexa Fluor® 647 prior to incubating with the yeast. In sort round 3, biotinylated TfR was incubated with the yeast first, and streptavidin-Alexa Fluor® 647 was added for secondary detection. In all sort rounds, expression was monitored using a chicken anti-c-Myc antibody (obtained from Thermo Fisher) against the C-terminal Myc tag on the yeast display construct.

[0127] FIGS. 2A-2C show binding of CH3C clones to TfR in the presence or absence of holo-Tf. Clones were assayed in a Fc-Fab fusion format. Ab204, a standard antibody with variable regions that bind to TfR, was used as a positive control in this assay. FIG. 2A shows binding of CH3C variants to human TfR coated on ELISA plates. FIG. 2B shows binding of CH3C variants to human TfR coated on ELISA plates in the presence of 5 μM holo-Tf. FIG. 2C shows binding of CH3C variants to cyno TfR coated on ELISA plates.

[0128] FIG. 3 shows binding of CH3C clones to 293F cells, which endogenously express human TfR. Cells were distributed in 96-well V bottom plates, and varying concentrations of the CH3C clones, formatted as Fc-Fab fusion binding proteins, were added. After 1 hour incubation at 4° C., the plates were spun and washed, and then incubated with goat-anti-human-IgG-Alexa Fluor® 647 secondary antibody at 4° C. for 30 minutes. After additional washing of the cells, the plates were read on a FACSCanto™ II flow cytometer, and median fluorescence values in the APC (647 nm) channel were determined using FlowJo® software.

[0129] FIGS. 4A and 4B show internalization of CH3C.3 in HEK293 cells, which endogenously express human TfR. CH3C.3 or controls were added at 1 μM concentration at 37° C. and 8% CO₂ concentration for 30 minutes, then the cells were washed, permeabilized, and stained with anti-human-IgG-Alexa Fluor® 488 secondary antibody. After additional washing, the cells were imaged by fluorescence microscopy and the number of puncta was quantified. FIG. 4A shows microscopy data. FIG. 4B shows a graph of the number of puncta per well.

[0130] FIG. 5 shows the selection scheme for the CH3C soft library. The initial library was sorted by MACS against either human (H) or cyno (C) TfR. The resulting yeast pools were then split and each sorted against human or cyno TfR as in the first FACS sort round. The resulting pools were split again for another FACS sort round. Finally, the HHH and CCC pools were kept separate and the other pools which had seen both species of target were finally pooled.

[0131] FIGS. 6A and 6B show binding of CH3C clones identified from the first soft randomization library to human and cyno TfR. Positive controls were Ab204, a high affinity anti-TfR antibody, and Ab084, a low-affinity anti-TfR antibody. FIG. 6A shows binding to human TfR. FIG. 6B shows binding to cyno TfR.

[0132] FIGS. 7A and 7B show binding of CH3C clones identified from the first soft randomization library to human TfR in the presence or absence of holo-Tf. Clones were in Fc-Fab fusion format. Ab204, a high affinity anti-TfR antibody, was used as a positive control in this assay. FIG. 7A shows binding of CH3C variants to human TfR coated on ELISA plates. FIG. 7B shows binding of CH3C variants to human TfR coated on ELISA plates in the presence of 5 μM holo-Tf.

[0133] FIG. 8 shows binding of CH3C clones identified from the first soft randomization library to 293F cells. Cells were distributed in 96-well V bottom plates, and varying concentrations of the CH3C clones, formatted as Fc-Fab fusion proteins, were added. After 1 hour incubation at 4° C., the plates were spun and washed, and then incubated with goat-anti-human-IgG-Alexa Fluor® 647 secondary antibody at 4° C. for 30 minutes. After additional washing of the cells, the plates were read on a FACSCanto™ II flow cytometer, and median fluorescence values in the APC (647 nm) channel were determined using FlowJo® software.

[0134] FIGS. 9A-9C show binding of CH3C clones identified from the first soft randomization library to CHO-K1 cells. Cells were distributed in 96-well V bottom plates, and varying concentrations of the CH3C clones, formatted as Fc-Fab fusions, were added. After 1 hour incubation at 4° C., the plates were spun and washed, and then incubated with goat-anti-human-IgG-Alexa Fluor® 647 secondary antibody at 4° C. for 30 minutes. After additional washing of the cells, the plates were read on a FACSCanto™ II flow cytometer, and median fluorescence values in the APC (647 nm) channel were determined using FlowJo® software. FIG. 9A shows CHO-K1 cells that overexpressed human TfR. FIG. 9B shows CHO-K1 cells that overexpressed cyno TfR. FIG. 9C shows CHO-K1 parental cells that did not express human TfR.

[0135] FIGS. 10A and 10B show the TfR apical domain. FIG. 10A shows the location of the apical domain on the human TfR protein. The inset shows a close-up view of the seven residues that differ between human and cyno TfR. FIG. 10B shows a sequence alignment containing the seven residues that differ between human (SEQ ID NO:30) and cyno (SEQ ID NO:31) TfR. The consensus sequence is SEQ ID NO:342.

[0136] FIGS. 11A-11E show binding of CH3C clones to the apical domain displayed on phage. FIG. 11A shows Myc expression of various TfR apical domain mutants, showing that the expression level of the mutants was similar and normalized. FIG. 11B shows CH3C.18 binding to wild-type and mutant human TfR apical domains, showing reduced binding to the R208G mutant. FIG. 11C shows CH3C.35 binding to wild-type and mutant human TfR apical domains, showing reduced binding to the R208G mutant. FIG. 11D shows CH3C.18 binding to wild-type human and cyno TfR apical domains and the G208R mutant cyno apical domain, showing recovery of binding to the mutant. FIG. 11E shows CH3C.35 binding to wild-type human and cyno TfR apical domains and the G208R mutant cyno apical domain, showing recovery of binding to the mutant.

[0137] FIGS. 12A-12D show paratope mapping of CH3C variants by reverting mutated positions to wild-type residues. FIG. 12A shows paratope mapping of CH3C.35 by ELISA binding to human TfR for reversion mutants. FIG. 12B shows paratope mapping of CH3C.35 by ELISA binding to cyno TfR for reversion mutants. FIG. 12C shows paratope mapping of CH3C.18 by ELISA binding to human TfR for reversion mutants. FIG. 12D shows paratope mapping of CH3C.18 by ELISA binding to cyno TfR for reversion mutants.

[0138] FIGS. 13A-13D show the design of CH3C consensus maturation libraries. FIG. 13A shows the consensus library based on the CH3C.35-like sequences. FIG. 13B shows the consensus library based on the CH3C.18-like sequences. FIG. 13C shows the gap libraries based on CH3C.18 and CH3C.35. FIG. 13D shows the aromatics library based on CH3C.18.

[0139] FIGS. 14A-14E show binding ELISAs of CH3C variants from consensus maturation libraries to human or cyno TfR. The new variants (i.e., CH3C.3.2-1, CH3C.3.2-5, and CH3C.3.2-19) had similar binding EC50 values to cyno and human TfR, whereas the parental clones CH3C.18 and CH3C.35 had significantly better EC50 values for human versus cyno TfR. FIG. 14A shows data for CH3C.3.2-1. FIG. 14B shows data for CH3C.3.2-19. FIG. 14C shows data for CH3C.3.2-5. FIG. 14D shows data for CH3C.18. FIG. 14E shows data for CH3 C.35.

[0140] FIG. 15 shows internalization of CH3C variants from consensus maturation libraries in human (HEK293) and monkey (LLC-MK2) cells. Clones CH3C.3.2-5 and CH3C3.2-19, which had similar human and cyno TfR affinities, had significantly improved uptake in monkey cells as compared to clone CH3C.35, which bound better to human TfR. Ab107, an anti-BACE1 antibody, was used as a negative control. (BACE1 is not expressed on HEK293 or MK2 cells). Ab204, an anti-TfR antibody, was used as a positive control.

[0141] FIG. 16 shows a map of NNK walk residues depicted on the CH3 structure (adapted from PDB 4W4O). Black surfaces show the original CH3C register, grey surfaces show the 44 residues incorporated into the NNK walk structure, and ribbons show the wild-type backbone.

[0142] FIG. 17 shows enriched yeast populations after three rounds of sorting the NNK walk library. Yeast were stained with anti- c-Myc to monitor expression (x-axis) and binding to the TfR apical domain (200 nM cyno or 200 nM human) (y-axis). The data presented here clearly show enhanced binding to both TfR apical domain orthologs.

[0143] FIGS. 18A and 18B show FACS data for CH3C.35.21 mutants. Yeast were stained with anti-c-Myc to monitor expression (x-axis) and binding to the human TfR apical domain (200 nM) (y-axis). FIG. 18A shows FACS data for clone CH3C.35.21. FIG. 18B shows FACS data for mutants wherein the 11 positions from clone CH3C.35.21 were mutated back to the wild-type (top row of FACS plots) or expressed as an NNK library of all 20 amino acids (bottom row of FACS plots, prior to any sorting).

[0144] FIGS. 19A-19D show ELISA comparisons of bivalent and monovalent CH3C polypeptide binding to human and cyno TfR. FIG. 19A shows bivalent CH3C polypeptides binding to human TfR. FIG. 19B shows bivalent CH3C polypeptides binding to cyno TfR. FIG. 19C shows monovalent CH3C polypeptides binding to human TfR. FIG. 19D shows monovalent CH3C polypeptides binding to cyno TfR.

[0145] FIGS. 20A-20E show cell binding of monovalent CH3C polypeptides. FIG. 20A shows 293F cells. FIG. 20B shows a zoom-in of the binding to 293F cells depicted in FIG. 20A. FIG. 20C shows CHO-K1 cells stably transfected with human TfR. FIG. 20D shows a zoom-in of the binding to CHO-K1 cells stably transfected with human TfR depicted in FIG. 20C. FIG. 20E shows CHO-K1 cells stably transfected with cyno TfR.

[0146] FIG. 21 shows internalization of monovalent and bivalent CH3C polypeptides in HEK293 cells.

[0147] FIGS. 22A-22H show binding kinetics for CH3C polypeptides. FIG. 22A shows data for CH3C.35.N163 binding to human TfR. FIG. 22B shows data for CHC3.35 binding to human TfR. FIG. 22C shows data for CHC3.35.N163 monovalent binding to human TfR. FIG. 22D shows data for CHC3.35 monovalent binding to human TfR. FIG. 22E shows data for CH3C.35.N163 binding to cyno TfR. FIG. 22F shows data for CHC3.35 binding to cyno TfR. FIG. 22G shows data for CHC3.35.N163 monovalent binding to cyno TfR. FIG. 22H shows data for CHC3.35 monovalent binding to cyno TfR.

[0148] FIGS. 23A-23F show binding kinetics for CH3C polypeptides. FIG. 23A shows data for CH3C.3.2-1 binding to human TfR. FIG. 23B shows data for CH3C.3.2-5 binding to human TfR. FIG. 23C shows data for CH3C.3.2-19 binding to human TfR. FIG. 23D shows data for CH3C.3.2-1 binding to cyno TfR. FIG. 23E shows data for CH3C.3.2-5 binding to cyno TfR. FIG. 23F shows data for CH3C.3.2-19 binding to cyno TfR.

[0149] FIGS. 24A-24E show binding of polypeptide-Fab fusions to FcRn at pH 5.5 in the presence (lower traces) or absence (upper traces) of the human TfR extracellular domain. FIG. 24A shows data for clone CH3C.35. FIG. 24B shows data for clone CH3C.35.19. FIG. 24C shows data for clone CH3C.35.20. FIG. 24D shows data for clone CH3C.35.21. FIG. 24E shows data for clone CH3C.35.24.

[0150] FIG. 25 shows pharmacokinetic (PK) analysis for CH3C polypeptides in wild-type mice. All polypeptide-Fab fusions had comparable clearance to wild-type Fc-Fab fusions (i.e., Ab122, an anti-RSV antibody, and Ab153, an anti-BACE1 antibody) except CH3C.3.2-5, which had faster clearance.

[0151] FIG. 26 shows brain pharmacokinetic/pharmacodynamic (PK/PD) data in mouse brain tissue. Chimeric huTfR heterozygous mice (n=4/group) were intravenously dosed with 42 mg/kg of either Ab153 or monovalent CH3C.35.N163 (labeled “CH3C.35.N163_mono”), and wild-type mice (n=3) were dosed intravenously with 50 mg/kg of control human IgG1 (labeled “huIgG1”). Bar graphs represent mean+/−SD.

[0152] FIGS. 27A and 27B show the concentration of IgG found in hTfR^{apical+/+} mice 24 hours after treatment with polypeptides at 50 mg/kg. FIG. 27A shows the concentration of IgG in plasma. FIG. 27B shows the concentration of IgG in brain tissue.

[0153] FIGS. 28A and 28B show target engagement of polypeptides dosed in hTfR^{apical+/+} mice after 24 hours, as measured by reductions in amyloid beta-protein 40 (Abeta 40). FIG. 28A shows Abeta 40 concentrations in plasma. FIG. 28B shows Abeta 40 concentrations in brain tissue.

[0154] FIG. 29 shows an SDS-PAGE gel of the sizing fraction of the CH3C.18 Fc and the TfR apical domain (AD) complex. Lane 1: Molecular weight marker. Lane 2: Reduced CH3C.18 Fc-AD complex after size-exclusion chromatography.

[0155] FIGS. 30A and 30B depict binding between polypeptides of the present invention and the transferrin receptor. FIG. 30A depicts the binding interface between clone CH3C.18 and the apical domain of the transferrin receptor. FIG. 30B shows a enlarged view of the binding interface depicted in FIG. 30A.

[0156] FIGS. 31A and 31B depict interactions between CH3C.18 and the TfR apical domain. FIG. 31A depicts the structural architecture (top) of the TfR apical domain and the CH3C.18 Fc, and the binding surfaces (within 5 angstroms) (bottom) of the TfR apical domain and the CH3C.18 Fc. The co-complex structure was solved at 3.6A resolution. The structure reveals the epitope on the TfR apical domain bound to CH3C.18. In particular, the N-terminal region of the apical domain is involved in CH3C Fc binding, and the structure is consistent with CH3C.18 Fc and TfR apical domain mutagenesis data. Also, the CH3C.18 library side chains are all contacting the TfR (within 5A). CH3C.18 library residues: L157, H159, V160, W161, A162, V163, P186, T189, and W194. Non-library residues: F196 and S156. FIG. 31B depicts CH3C.18 Fc and TfR apical domain key interactions. A cation-pi interaction between W161 on the CH3C.18 Fc and R208 on the apical domain is a central binding interaction. Mutation of either CH3C.18 W388 or apical domain R208 disrupts CH3C.18 Fc and apical domain binding. Consistent with this, the R208G mutation from human to cyno explains the reduced cyno affinity. Furthermore, non-conserved residues in the human apical domain (N292 and E294 (K292 and D294 in cyno)) are nearby. Therefore, Q192 in CH3C.18 may be mutated to selectively improve cyno versus human binding.

[0157] FIGS. 32A and 32B depict binding between polypeptides of the present invention and the transferrin receptor. FIG. 32A depicts hydrogen bonds and non-bonded contacts between residues in clone CH3C.18 (Chain A) and the apical domain of the transferrin receptor (Chain D). FIG. 32B depicts hydrogen bonds and non-bonded contacts between residues in clone CH3C.18 (Chain B) and the apical domain of the transferrin receptor (Chain C).

[0158] FIG. 33 shows an alignment of human IgG1, IgG2, IgG3, and IgG4 amino acid sequences (SEQ ID NOS:343-346).

[0159] FIGS. 34A-34C depict binding between polypeptides of the present invention and the transferrin receptor. FIG. 34A depicts the structural architecture (top) of the TfR apical domain and the CH3C.35 Fc, and the binding surfaces (within 5 A) (bottom) of the TfR apical domain and the CH3C.35 Fc. The co-complex structure was solved at 3.4A resolution. The structure reveals the epitope on the TfR apical domain bound to CH3C.35. The CH3C.35 library side chains are all contacting the TfR (within 5 A). CH3C.35 library residues: Y157, T159, E160, W161, S162, T186, E189, and W194. Non-library residues: F196, 5156, Q192. FIGS. 34B and 34C show enlarged views of the binding interface between clone CH3C.35 and the apical domain of the transferrin receptor depicted in FIG. 34A.

[0160] FIG. 35A depicts an overlaid structure between the CH3C.35 Fc and TfR-AD complex and the CH3C.18 Fc and TfR-AD complex.

[0161] FIG. 35B depicts an enlarged view of the overlaid structure in FIG. 35A.

[0162] FIGS. 36A and 36B depict binding between polypeptides of the present invention and the transferrin receptor. FIG. 36A depicts hydrogen bonds and non-bonded contacts between residues in clone CH3C.35 (Chain A) and the apical domain of the transferrin receptor (Chain D). FIG. 36B depicts hydrogen bonds and non-bonded contacts between residues in clone CH3C.35 (Chain B) and the apical domain of the transferrin receptor (Chain C).

[0163] FIGS. 37A and 37B depict plasma PK and A1340 reduction for an Fc-Fab fusion polypeptide comprising a CH3C variant fused to the Ab153 Fab domain in cynomolgus monkeys. FIG. 37A shows that Ab210 and CH3C.35.9:Ab153 exhibited faster clearance due to TfR-mediated clearance compared to control IgG (Ab122) and Ab153. FIG. 37B shows that Ab153, Ab210, and CH3C.35.9:Ab153, which all bind to and inhibit BACE1, exhibited significant A1340 reduction in plasma.

[0164] FIGS. 38A and 38B depict significant cerebrospinal fluid (CSF) AP and sAPPβ/sAPPα reduction with an Fc-Fab fusion polypeptide comprising a CH3C variant fused to the Ab153 Fab domain in cynomolgus monkeys. FIG. 38A shows that animals dosed with Ab210 and CH3C.35.9:Ab153 showed about 70% reduction in CSF A1340 compared to Ab153 and control IgG (Ab122). FIG. 38B shows that animals dosed with Ab210 and CH3C.35.9:Ab153 showed about 75% reduction in sAPPβ/sAPPα ratio compared to Ab153 and control IgG (Ab122). n=4/group. Line graphs represent mean±SEM.

[0165] FIGS. 39A and 39B depict huIgG1 concentrations in plasma (FIG. 39A) and brain lysates (FIG. 39B) of hTfRapicar^{+/+} knock-in (KI) mice after a single 50 mg/kg systemic injection of anti-BACE1_Ab153, CH3C35.21:Ab153, CH3C35.20:Ab153, or CH3C35:Ab153 polypeptide fusion (mean±SEM, n=5 per group).

[0166] FIG. 39C depicts endogenous mouse AP concentration in brain lysate of hTfRapical^{+/+} KI mice after a single 50 mg/kg systemic injection of anti-BACE1_Ab153, CH3C35.21:Ab153, CH3C35.20:Ab153, or CH3C35:Ab153 polypeptide fusion (mean±SEM, n=5 per group).

[0167] FIG. 39D depicts Western blot quantification of brain TfR protein normalized to actin in brain lysate of hTfRapical^{+/+} KI mice after a single 50 mg/kg systemic injection of anti-BACE1_Ab153, CH3C35.21:Ab153, CH3C35.20:Ab153, or CH3C35:Ab153 polypeptide fusion (mean±SEM, n=5 per group).

[0168] FIGS. 40A and 40B depict huIgG1 concentrations in plasma (FIG. 40A) and brain lysates (FIG. 40B) of hTfR^{apical+/+} KI mice after a single 50 mg/kg systemic injection of anti-BACE1_Ab153, CH3C.35.23:Ab153, or CH3C.35.23.3:Ab153 polypeptide fusion (mean±SEM, n=5 per group).

[0169] FIG. 40C depicts endogenous mouse AP concentration in brain lysate of hTfR^{apical+/+} KI mice after a single 50 mg/kg systemic injection of anti-BACE1_Ab153, CH3C.35.23:Ab153, or CH3C.35.23.3:Ab153 polypeptide fusion (mean±SEM, n=5 per group).

[0170] FIG. 40D depicts Western blot quantification of brain TfR protein normalized to actin in brain lysate of hTfR^{apical+/+} KI mice after a single 50 mg/kg systemic injection of anti-BACE1_Ab153, CH3C.35.23:Ab153, or CH3C.35.23.3:Ab153 polypeptide fusion (mean±SEM, n=4 per group).

[0171] FIGS. 41A-41D depict 28-day PKPD study in cynomolgus monkeys after a single 30 mg/kg dose of the indicated proteins. FIGS. 41A and 41B depict serum huIgG1 in serum and plasma Aβ concentration in plasma, showing peripheral exposure of dosed compounds and resulting effects on plasma AP levels over time. FIGS. 41C and 41D depict Aβ and sAPPβ/sAPPα in CSF of cynomolgus monkeys following dosing (mean±SEM, n=4-5 per group).

[0172] FIGS. 42A-42C depict blood reticulocyte relative to pre-dose levels (FIG. 42A), absolute serum iron levels (FIG. 42B), and absolute red blood cell count (FIG. 42C) in peripheral blood in cynomolgus monkeys after a single 30 mg/kg dose of the indicated proteins (mean±SEM, n=4-5 per group).

[0173] FIGS. 43A and 43B depict peripheral PK analysis (plasma huIgG1 concentrations (FIG. 43A) and clearance values (FIG. 43B)) of indicated proteins in hFcRn knock-in mice after a single 10 mg/kg intravenous injection over 14 days (mean±SEM, n=3 per group).

[0174] FIG. 44 depicts the median fluorescence intensity of TfR-binding CH3C.18 variants.

### DETAILED DESCRIPTION

### I. INTRODUCTION

[0175] Described herein are polypeptides that bind a transferrin receptor (TfR). The invention is based, in part, on the discovery that certain amino acids in an Fc region can be modified to generate a novel binding site specific for TfR in the Fc polypeptide. Taking advantage of the fact that TfR is highly-expressed on the blood-brain barrier (BBB) and that TfR naturally moves transferrin from the blood into the brain, these polypeptides can be used to transport therapeutic agents (e.g., therapeutic polypeptides, antibody variable regions such as Fabs, and small molecules) across the BBB. This approach can substantially improve brain uptake of the therapeutic agents and is therefore highly useful for treating disorders and diseases where brain delivery is advantageous.

[0176] In one aspect, the invention is based, in part, on the discovery that certain sets of amino acids in a CH3 domain polypeptide can be substituted to generate a polypeptide that binds a transferrin receptor. Thus, in one aspect, provided herein are transferrin receptor-binding polypeptides that have multiple substitutions at a set of amino acids comprising positions 157, 159, 160, 161, 162, 163, 186, 189, and 194, as numbered with reference to SEQ ID NO:1. Anywhere from four to all of the amino acid positions of the set may be substituted. For purposes of this disclosure, a substitution is determined with reference to SEQ ID NO:1. Thus, an amino acid is considered to be a substitution if it differs from the corresponding amino acid in position SEQ ID NO:1 even if the amino acid is present at that position in a naturally occurring CH3 domain polypeptide.

[0177] In a further aspect, provided herein are treatment methods and methods of using a transferrin receptor-binding polypeptide to target a composition to transferrin receptor-expressing cells, e.g., to deliver the composition to that cell, or to deliver a composition across an endothelium such as the blood-brain barrier.

### II. DEFINITIONS

[0178] As used herein, the singular forms “a,” “an,” and “the” include plural referents unless the content clearly dictates otherwise. Thus, for example, reference to “a polypeptide” may include two or more such molecules, and the like.

[0179] As used herein, the terms “about” and “approximately,” when used to modify an amount specified in a numeric value or range, indicate that the numeric value as well as reasonable deviations from the value known to the skilled person in the art, for example ±20%, ±10%, or ±5%, are within the intended meaning of the recited value.

[0180] A “transferrin receptor” or “TfR” as used in the context of this invention refers to transferrin receptor protein 1. The human transferrin receptor 1 polypeptide sequence is set forth in SEQ ID NO:38. Transferrin receptor protein 1 sequences from other species are also known (e.g., chimpanzee, accession number XP_003310238.1; rhesus monkey, NP_001244232.1; dog, NP_001003111.1; cattle, NP_001193506.1; mouse, NP_035768.1; rat, NP_073203.1; and chicken, NP_990587.1). The term “transferrin receptor” also encompasses allelic variants of exemplary reference sequences, e.g., human sequences, that are encoded by a gene at a transferrin receptor protein 1 chromosomal locus. Full length transferrin receptor protein includes a short N-terminal intracellular region, a transmembrane region, and a large extracellular domain. The extracellular domain is characterized by three domains: a protease-like domain, a helical domain, and an apical domain. The apical domain sequence of human transferrin receptor 1 is set forth in SEQ ID NO:30.

[0181] The terms “CH3 domain” and “CH2 domain” as used herein refer to immunoglobulin constant region domain polypeptides. In the context of IgG antibodies, a CH3 domain polypeptide refers to the segment of amino acids from about position 341 to about position 447 as numbered according to the EU numbering scheme, and a CH2 domain polypeptide refers to the segment of amino acids from about position 231 to about position 340 as numbered according to the EU numbering scheme. CH2 and CH3 domain polypeptides may also be numbered by the IMGT (ImMunoGeneTics) numbering scheme in which the CH2 domain numbering is 1-110 and the CH3 domain numbering is 1-107, according to the IMGT Scientific chart numbering (IMGT website). CH2 and CH3 domains are part of the Fc region of an immunoglobulin. In the context of IgG antibodies, an Fc region refers to the segment of amino acids from about position 231 to about position 447 as numbered according to the EU numbering scheme. As used herein, the term “Fc region” may also include at least a part of a hinge region of an antibody. An illustrative hinge region sequence is set forth in SEQ ID NO:37.

[0182] The terms “wild-type,” “native,” and “naturally occurring” with respect to a CH3 or CH2 domain are used herein to refer to a domain that has a sequence that occurs in nature.

[0183] In the context of this invention, the term “mutant” with respect to a mutant polypeptide or mutant polynucleotide is used interchangeably with “variant.” A variant with respect to a given wild-type CH3 or CH2 domain reference sequence can include naturally occurring allelic variants. A “non-naturally” occurring CH3 or CH2 domain refers to a variant or mutant domain that is not present in a cell in nature and that is produced by genetic modification, e.g., using genetic engineering technology or mutagenesis techniques, of a native CH3 domain or CH2 domain polynucleotide or polypeptide. A “variant” includes any domain comprising at least one amino acid mutation with respect to wild-type. Mutations may include substitutions, insertions, and deletions.

[0184] The term “amino acid” refers to naturally occurring and synthetic amino acids, as well as amino acid analogs and amino acid mimetics that function in a manner similar to the naturally occurring amino acids.

[0185] Naturally occurring amino acids are those encoded by the genetic code, as well as those amino acids that are later modified, e.g., hydroxyproline, y-carboxyglutamate and O-phosphoserine. “Amino acid analogs” refers to compounds that have the same basic chemical structure as a naturally occurring amino acid, i.e., an a carbon that is bound to a hydrogen, a carboxyl group, an amino group, and an R group, e.g., homoserine, norleucine, methionine sulfoxide, methionine methyl sulfonium. Such analogs have modified R groups (e.g., norleucine) or modified peptide backbones, but retain the same basic chemical structure as a naturally occurring amino acid. “Amino acid mimetics” refers to chemical compounds that have a structure that is different from the general chemical structure of an amino acid, but that function in a manner similar to a naturally occurring amino acid.

[0186] Naturally occurring a-amino acids include, without limitation, alanine (Ala), cysteine (Cys), aspartic acid (Asp), glutamic acid (Glu), phenylalanine (Phe), glycine (Gly), histidine (His), isoleucine (Ile), arginine (Arg), lysine (Lys), leucine (Leu), methionine (Met), asparagine (Asn), proline (Pro), glutamine (Gln), serine (Ser), threonine (Thr), valine (Val), tryptophan (Trp), tyrosine (Tyr), and combinations thereof. Stereoisomers of a naturally occurring a-amino acids include, without limitation, D-alanine (D-Ala), D-cysteine (D-Cys), D-aspartic acid (D-Asp), D-glutamic acid (D-Glu), D-phenylalanine (D-Phe), D-histidine (D-His), D-isoleucine (D-Ile), D-arginine (D-Arg), D-lysine (D-Lys), D-leucine (D-Leu), D-methionine (D-Met), D-asparagine (D-Asn), D-proline (D-Pro), D-glutamine (D-Gln), D-serine (D-Ser), D-threonine (D-Thr), D-valine (D-Val), D-tryptophan (D-Trp), D-tyrosine (D-Tyr), and combinations thereof.

[0187] Amino acids may be referred to herein by either their commonly known three letter symbols or by the one-letter symbols recommended by the IUPAC-IUB Biochemical Nomenclature Commission.

[0188] The terms “polypeptide,” “peptide,” and “protein” are used interchangeably herein to refer to a polymer of amino acid residues. The terms apply to amino acid polymers in which one or more amino acid residue is an artificial chemical mimetic of a corresponding naturally occurring amino acid, as well as to naturally occurring amino acid polymers and non-naturally occurring amino acid polymers. Amino acid polymers may comprise entirely L-amino acids, entirely D-amino acids, or a mixture of L and D amino acids.

[0189] The term “conservative substitution,” “conservative mutation,” or “conservatively modified variant” refers to an alteration that results in the substitution of an amino acid with another amino acid that can be categorized as having a similar feature. Examples of categories of conservative amino acid groups defined in this manner can include: a “charged/polar group” including Glu (Glutamic acid or E), Asp (Aspartic acid or D), Asn (Asparagine or N), Gln (Glutamine or Q), Lys (Lysine or K), Arg (Arginine or R), and His (Histidine or H); an “aromatic group” including Phe (Phenylalanine or F), Tyr (Tyrosine or Y), Trp (Tryptophan or W), and (Histidine or H); and an “aliphatic group” including Gly (Glycine or G), Ala (Alanine or A), Val (Valine or V), Leu (Leucine or L), Ile (Isoleucine or I), Met (Methionine or M), Ser (Serine or S), Thr (Threonine or T), and Cys (Cysteine or C). Within each group, subgroups can also be identified. For example, the group of charged or polar amino acids can be sub-divided into sub-groups including: a “positively-charged sub-group” comprising Lys, Arg and His; a “negatively-charged sub-group” comprising Glu and Asp; and a “polar sub-group” comprising Asn and Gln. In another example, the aromatic or cyclic group can be sub-divided into sub-groups including: a “nitrogen ring sub-group” comprising Pro, His and Trp; and a “phenyl sub-group” comprising Phe and Tyr. In another further example, the aliphatic group can be sub-divided into sub-groups, e.g., an “aliphatic non-polar sub-group” comprising Val, Leu, Gly, and Ala; and an “aliphatic slightly-polar sub-group” comprising Met, Ser, Thr, and Cys. Examples of categories of conservative mutations include amino acid substitutions of amino acids within the sub-groups above, such as, but not limited to: Lys for Arg or vice versa, such that a positive charge can be maintained; Glu for Asp or vice versa, such that a negative charge can be maintained; Ser for Thr or vice versa, such that a free —OH can be maintained; and Gln for Asn or vice versa, such that a free —NH₂ can be maintained. In some embodiments, hydrophobic amino acids are substituted for naturally occurring hydrophobic amino acid, e.g., in the active site, to preserve hydrophobicity.

[0190] The terms “identical” or percent “identity,” in the context of two or more polypeptide sequences, refer to two or more sequences or subsequences that are the same or have a specified percentage of amino acid residues, e.g., at least 60%, at least 65%, at least 70%, at least 75%, at least 80%, at least 85%, at least 90%, or at least 95% or greater, that are identical over a specified region when compared and aligned for maximum correspondence over a comparison window or designated region, as measured using a sequence comparison algorithm or by manual alignment and visual inspection.

[0191] For sequence comparison of polypeptides, typically one amino acid sequence acts as a reference sequence, to which a candidate sequence is compared. Alignment can be performed using various methods available to one of skill in the art, e.g., visual alignment or using publicly available software using known algorithms to achieve maximal alignment. Such programs include the BLAST programs, ALIGN, ALIGN-2 (Genentech, South San Francisco, Calif) or Megalign (DNASTAR). The parameters employed for an alignment to achieve maximal alignment can be determined by one of skill in the art. For sequence comparison of polypeptide sequences for purposes of this application, the BLASTP algorithm standard protein BLAST for aligning two proteins sequence with the default parameters is used.

[0192] The terms “corresponding to,” “determined with reference to,” or “numbered with reference to” when used in the context of the identification of a given amino acid residue in a polypeptide sequence, refers to the position of the residue of a specified reference sequence when the given amino acid sequence is maximally aligned and compared to the reference sequence. Thus, for example, an amino acid residue in a polypeptide “corresponds to” an amino acid in the region of SEQ ID NO:1 from amino acids 114-220 when the residue aligns with the amino acid in SEQ ID NO:1 when optimally aligned to SEQ ID NO:1. The polypeptide that is aligned to the reference sequence need not be the same length as the reference sequence.

[0193] A “binding affinity” as used herein refers to the strength of the non-covalent interaction between two molecules, e.g., a single binding site on a polypeptide and a target, e.g., transferrin receptor, to which it binds. Thus, for example, the term may refer to 1:1 interactions between a polypeptide and its target, unless otherwise indicated or clear from context. Binding affinity may be quantified by measuring an equilibrium dissociation constant (K_{D}), which refers to the dissociation rate constant (k_{d}, time⁻¹) divided by the association rate constant (kₐ, time⁻¹ M⁻¹). K_{D} can be determined by measurement of the kinetics of complex formation and dissociation, e.g., using Surface Plasmon Resonance (SPR) methods, e.g., a Biacore™ system; kinetic exclusion assays such as KinExA®; and BioLayer interferometry (e.g., using the ForteBio® Octet® platform). As used herein, “binding affinity” includes not only formal binding affinities, such as those reflecting 1:1 interactions between a polypeptide and its target, but also apparent affinities for which K_{D}'s are calculated that may reflect avid binding.

[0194] As used herein, the term “specifically binds” or “selectively binds” to a target, e.g., TfR, when referring to a polypeptide comprising a modified CH3 domain as described herein, refers to a binding reaction whereby the polypeptide binds to the target with greater affinity, greater avidity, and/or greater duration than it binds to a structurally different target. In typical embodiments, the polypeptide has at least 5-fold, 6-fold, 7-fold, 8-fold, 9-fold, 10-fold, 20-fold, 25-fold, 50-fold, 100-fold, 1000-fold, 10,000-fold, or greater affinity for a specific target, e.g., TfR, compared to an unrelated target when assayed under the same affinity assay conditions. The term “specific binding,” “specifically binds to,” or “is specific for” a particular target (e.g., TfR), as used herein, can be exhibited, for example, by a molecule having an equilibrium dissociation constant KD for the target to which it binds of, e.g., 10⁻⁴ M or smaller, e.g., 10⁻⁵ M, 10⁻⁶ M, 10⁻⁷ M, 10⁻⁸ M, 10⁻⁹ M, 10⁻¹⁰ M, 10⁻¹¹ M, or 10⁻¹² M. In some embodiments, a modified CH3 domain polypeptide specifically binds to an epitope on TfR that is conserved among species (e.g., structurally conserved among species), e.g., conserved between non-human primate and human species (e.g., structurally conserved between non-human primate and human species). In some embodiments, a polypeptide may bind exclusively to a human TfR.

[0195] The term “subject,” “individual,” and “patient,” as used interchangeably herein, refer to a mammal, including but not limited to humans, non-human primates, rodents (e.g., rats, mice, and guinea pigs), rabbits, cows, pigs, horses, and other mammalian species. In one embodiment, the patient is a human.

[0196] The terms “treatment,” “treating,” and the like are used herein to generally mean obtaining a desired pharmacologic and/or physiologic effect. “Treating” or “treatment” may refer to any indicia of success in the treatment or amelioration of an injury, disease, or condition, including any objective or subjective parameter such as abatement, remission, improvement in patient survival, increase in survival time or rate, diminishing of symptoms or making the injury, disease, or condition more tolerable to the patient, slowing in the rate of degeneration or decline, or improving a patient's physical or mental well-being. The treatment or amelioration of symptoms can be based on objective or subjective parameters. The effect of treatment can be compared to an individual or pool of individuals not receiving the treatment, or to the same patient prior to treatment or at a different time during treatment.

[0197] The term “pharmaceutically acceptable excipient” refers to a non-active pharmaceutical ingredient that is biologically or pharmacologically compatible for use in humans or animals, such as but not limited to a buffer, carrier, or preservative.

[0198] As used herein, a “therapeutic amount” or “therapeutically effective amount” of an agent is an amount of the agent that treats, alleviates, abates, or reduces the severity of symptoms of a disease in a subject. A “therapeutic amount” or “therapeutically effective amount” of an agent may improve patient survival, increase survival time or rate, diminish symptoms, make an injury, disease, or condition more tolerable, slow the rate of degeneration or decline, or improve a patient's physical or mental well-being.

[0199] The term “administer” refers to a method of delivering agents, compounds, or compositions to the desired site of biological action. These methods include, but are not limited to, topical delivery, parenteral delivery, intravenous delivery, intradermal delivery, intramuscular delivery, intrathecal delivery, colonic delivery, rectal delivery, or intraperitoneal delivery. In one embodiment, the polypeptides described herein are administered intravenously.

### III. TRANSFERRIN RECEPTOR-BINDING POLYPEPTIDES

[0200] This section describes generation of polypeptides in accordance with the invention that bind to a transferrin receptor and are capable of being transported across the blood-brain barrier (BBB).

[0201] In one aspect, polypeptides are provided that comprise CH3 domains that have modifications that allow the polypeptides to specifically bind to a transferrin receptor. The modifications are introduced into a specified set of amino acids that are present at the surface of the CH3 domain. In some embodiments, polypeptides comprising modified CH3 domains specifically bind to an epitope in the apical domain of the transferrin receptor.

[0202] One of skill understands that CH3 domains of other immunoglobulin isotypes, e.g., IgM, IgA, IgE, IgD, etc. may be similarly modified by identifying the amino acids in those domains that correspond to the specified set of amino acids described herein. Modifications may also be made to corresponding domains from immunoglobulins from other species, e.g., non-human primates, monkey, mouse, rat, rabbit, dog, pig, chicken, and the like.

### CH3 Transferrin Receptor-Binding Polypeptides

[0203] In some embodiments, the domain that is modified is a human Ig CH3 domain, such as an IgG CH3 domain. The CH3 domain can be of any IgG subtype, i.e., from IgG1, IgG2, IgG3, or IgG4. In the context of IgG antibodies, a CH3 domain refers to the segment of amino acids from about position 341 to about position 447 as numbered according to the EU numbering scheme. The positions in the CH3 domain for purposes of identifying the corresponding set of amino acid positions for transferrin receptor binding are determined with reference to SEQ ID NO:3 or determined with reference to amino acids 114-220 of SEQ ID NO:1 unless otherwise specified. Substitutions are also determined with reference to SEQ ID NO:1, i.e., an amino acid is considered to be a substitution relative to the amino acid at the corresponding position in SEQ ID NO:1.SEQ ID NO:1 includes a partial hinge region sequence, PCP, as amino acids 1-3. The numbering of the positions in the CH3 domain with reference to SEQ ID NO:1 includes the first three amino acids.

[0204] As indicated above, a set of residues of a CH3 domain that can be modified in accordance with the invention is numbered herein with reference to SEQ ID NO:1. Any CH3 domain, e.g., an IgG1, IgG2, IgG3, or IgG4 CH3 domain, may have modifications, e.g., amino acid substitutions, in a set of residues that correspond to residues at the noted positions in SEQ ID NO:1. An alignment of the human IgG1 amino acid sequence of SEQ ID NO:1 with human IgG2, IgG3, and IgG4 is shown in FIG. 33. The positions of each of the IgG2, IgG3, and IgG4 sequences that correspond to any given position of SEQ ID NO:1 can be readily determined.

[0205] In one embodiment, a modified CH3 domain polypeptide that specifically binds transferrin receptor binds to the apical domain of the transferrin receptor at an epitope that comprises position 208 of the full length human transferrin receptor sequence (SEQ ID NO:38), which corresponds to position 11 of the human transferrin receptor apical domain sequence set forth in SEQ ID NO:30. SEQ ID NO:30 corresponds to amino acids 198-378 of the human transferrin receptor-1 uniprotein sequence P02786 (SEQ ID NO:38). In some embodiments, the modified CH3 domain polypeptide binds to the apical domain of the transferrin receptor at an epitope that comprises positions 158, 188, 199, 207, 208, 209, 210, 211, 212, 213, 214, 215, and/or 294 of the full length human transferrin receptor sequence (SEQ ID NO:38). The modified CH3 domain polypeptide may bind to the transferrin receptor without blocking or otherwise inhibiting binding of transferrin to the receptor. In some embodiments, binding of transferrin to TfR is not substantially inhibited. In some embodiments, binding of transferrin to TfR is inhibited by less than about 50% (e.g., less than about 45%, 40%, 35%, 30%, 25%, 20%, 15%, 10%, or 5%). In some embodiments, binding of transferrin to TfR is inhibited by less than about 20% (e.g., less than about 19%, 18%, 17%, 16%, 15%, 14%, 13%, 12%, 11%, 10%, 9%, 8%, 7%, 6%, 5%, 4%, 3%, 2%, or 1%). Illustrative CH3 domain polypeptides that exhibit this binding specificity include polypeptides having amino acid substitutions at positions 157, 159, 160, 161, 162, 163, 186, 189, and 194 as determined with reference to amino acids 114-220 of SEQ ID NO:1.

[0206] CH3 Transferrin Receptor Binding Set: 157, 159, 160, 161, 162, 163, 186, 189, and 194

[0207] In some embodiments, a modified CH3 domain polypeptide in accordance with the invention comprises at least three or at least four, and typically five, six, seven, eight, or nine substitutions in a set of amino acid positions comprising 157, 159, 160, 161, 162, 163, 186, 189, and 194. Illustrative substitutions that may be introduced at these positions are shown in Table 1. In some embodiments, the amino acid at position 161 and/or 194 is an aromatic amino acid, e.g., Trp, Phe, or Tyr. In some embodiments, the amino acid at position 161 is Trp. In some embodiments, the amino acid at position 161 is Gly. In some embodiments, the aromatic amino acid at position 194 is Trp or Phe.

[0208] In some embodiments, a modified CH3 domain polypeptide that specifically binds a transferrin receptor comprises at least one position having a substitution, relative to SEQ ID NO:1, as follows: Leu, Tyr, Met, or Val at position 157; Leu, Thr, His, or Pro at position 159; Val, Pro, or an acidic amino acid at position 160; an aromatic amino acid, e.g., Trp or Gly (e.g., Trp) at position 161; Val, Ser, or Ala at position 162; an acidic amino acid, Ala, Ser, Leu, Thr, or Pro at position 186; Thr or an acidic amino acid at position 189; or Trp, Tyr, His, or Phe at position 194. In some embodiments, a modified CH3 domain polypeptide may comprise a conservative substitution, e.g., an amino acid in the same charge grouping, hydrophobicity grouping, side chain ring structure grouping (e.g., aromatic amino acids), or size grouping, and/or polar or non-polar grouping, of a specified amino acid at one or more of the positions in the set. Thus, for example, Ile may be present at position 157, 159, and/or position 186. In some embodiments, the acidic amino acid at position one, two, or each of positions 160, 186, and 189 is Glu. In other embodiments, the acidic amino acid at one, two or each of positions 160, 186, and 189 is Asp. In some embodiments, two, three, four five, six, seven, or all eight of positions 157, 159, 160, 161, 162, 186, 189, and 194 have an amino acid substitution as specified in this paragraph.

[0209] In some embodiments, the modified CH3 domain polypeptide comprises a native Asn at position 163. In some embodiments, the modified CH3 domain polypeptide comprises Gly, His, Gln, Leu, Lys, Val, Phe, Ser, Ala, or Asp at position 163. In some embodiments, the modified CH3 domain polypeptide further comprises one, two, three, or four substitutions at positions comprising 153, 164, 165, and 188. In some embodiments, Trp, Tyr, Leu, or Gln may be present at position 153. In some embodiments, Ser, Thr, Gln, or Phe may be present at position 164. In some embodiments, Gln, Phe, or His may be present at position 165. In some embodiments, Glu may be present at position 188.

[0210] In certain embodiments, the modified CH3 domain polypeptide comprises two, three, four, five, six, seven, eight nine, or ten positions selected from the following: Trp, Leu, or Glu at position 153; Tyr or Phe at position 157; Thr at position 159; Glu at position 160; Trp at position 161; Ser, Ala, Val, or Asn at position 162; Ser or Asn at position 163; Thr or Ser at position 186; Glu or Ser at position 188; Glu at position 189; and/or Phe at position 194. In some embodiments, the modified CH3 domain polypeptide comprises all eleven positions as follows: Trp, Leu, or Glu at position 153; Tyr or Phe at position 157; Thr at position 159; Glu at position 160; Trp at position 161; Ser, Ala, Val, or Asn at position 162; Ser or Asn at position 163; Thr or Ser at position 186; Glu or Ser at position 188; Glu at position 189; and/or Phe at position 194.

[0211] In certain embodiments, the modified CH3 domain polypeptide comprises Leu or Met at position 157; Leu, His, or Pro at position 159; Val at position 160; Trp at position 161; Val or Ala at position 162; Pro at position 186; Thr at position 189; and/or Trp at position 194. In some embodiments, the modified CH3 domain polypeptide further comprises Ser, Thr, Gln, or Phe at position 164. In some embodiments, a modified CH3 domain polypeptide further comprises Trp, Tyr, Leu, or Gln at position 153 and/or Gln, Phe, or His at position 165. In some embodiments, Trp is present at position 153 and/or Gln is present at position 165. In some embodiments, a modified CH3 domain polypeptide does not have a Trp at position 153.

[0212] In other embodiments, a modified CH3 domain polypeptide comprises Tyr at position 157; Thr at position 159; Glu or Val at position 160; Trp at position 161; Ser at position 162; Ser or Thr at position 186; Glu at position 189; and/or Phe at position 194. In some embodiments, the modified CH3 domain polypeptide comprises a native Asn at position 163. In certain embodiments, the modified CH3 domain polypeptide further comprises Trp, Tyr, Leu, or Gln at position 153; and/or Glu at position 188. In some embodiments, the modified CH3 domain polypeptide further comprises Trp at position 153 and/or Glu at position 188.

[0213] In some embodiments, the modified CH3 domain polypeptide comprises one or more of the following substitutions: Trp at position 153; Thr at position 159; Trp at position 161; Val at position 162; Ser or Thr at position 186; Glu at position 188; and/or Phe at position 194.

[0214] In additional embodiments, the modified CH3 domain polypeptide further comprises one, two, or three positions selected from the following: position 187 is Lys, Arg, Gly, or Pro; position 197 is Ser, Thr, Glu, or Lys; and position 199 is Ser, Trp, or Gly.

[0215] In some embodiments, a modified CH3 domain polypeptide that specifically binds transferrin receptor has at least 70% identity, at least 75% identity, at least 80% identity, at least 85% identity, at least 90% identity, or at least 95% identity to amino acids 114-220 of any one of SEQ ID NOS:4-29, 39-102, and 182-195. In some embodiments, such a modified CH3 domain polypeptide comprises amino acids 157-163 and/or 186-194 of any one of SEQ ID NOS:4-29, 39-102, and 182-195. In some embodiments, such a modified CH3 domain polypeptide comprises amino acids 153-163 and/or 186-194 of any one of SEQ ID NOS:4-29, 39-102, and 182-195. In some embodiments, a modified CH3 domain polypeptide comprises amino acids 153-163 and/or 186-199 of any one of SEQ ID NOS:4-29, 39-102, and 182-195.

[0216] In some embodiments, a modified CH3 domain polypeptide that specifically binds transferrin receptor has at least 70% identity, at least 75% identity, at least 80% identity, at least 85% identity, at least 90% identity, or at least 95% identity to amino acids 114-220 of SEQ ID NO:1, with the proviso that the percent identity does not include the set of positions 157, 159, 160, 161, 162, 163, 186, 189, and 194. In some embodiments, the modified CH3 domain polypeptide comprises amino acids 157-163 and/or amino acids 186-194 as set forth in any one of SEQ ID NOS:4-29, 39-102, and 182-195.

[0217] In some embodiments, a modified CH3 domain polypeptide has at least 70% identity, at least 75% identity, at least 80% identity, at least 85% identity, at least 90% identity, or at least 95% identity to any one of SEQ ID NOS:4-29, 39-102, and 182-195, with the proviso that at least five, six, seven, eight, nine, ten, eleven, twelve, thirteen, fourteen, fifteen, or sixteen of the positions that correspond to positions 153, 157, 159, 160, 161, 162, 163, 164, 165, 186, 187, 188, 189, 194, 197, and 199 of any one of SEQ ID NOS:4-29, 39-102, and 182-195 are not deleted or substituted.

[0218] In some embodiments, the modified CH3 domain polypeptide has at least 75% identity, at least 80% identity, at least 85% identity, at least 90% identity, or at least 95% identity to any one of SEQ ID NOS:4-29, 39-102, and 182-195 and also comprises at at least five, six, seven, eight, nine, ten, eleven, twelve, thirteen, fourteen, fifteen or sixteen of the positions as follows: Trp, Tyr, Leu, Gln, or Glu at position 153; Leu, Tyr, Met, or Val at position 157; Leu, Thr, His, or Pro at position 159; Val, Pro, or an acidic amino acid at position 160; an aromatic amino acid, e.g., Trp, at position 161; Val, Ser, or Ala at position 162; Ser or Asn at position 163; Ser, Thr, Gln, or Phe at position 164; Gln, Phe, or His at position 165; an acidic amino acid, Ala, Ser, Leu, Thr, or Pro at position 186; Lys, Arg, Gly or Pro at position 187; Glu or Ser at position 188; Thr or an acidic amino acid at position 189; Trp, Tyr, His or Phe at position 194; Ser, Thr, Glu or Lys at position 197; and Ser, Trp, or Gly at position 199.

[0219] In some embodiments, a modified CH3 domain polypeptide in accordance with the invention comprises one or more substitutions in a set of amino acid positions comprising 153, 157, 159, 160, 162, 163, 186, 188, 189, 194, 197, and 199; and wherein the substitutions and the positions are determined with reference to the sequence of SEQ ID NO:13. In some embodiments, the modified CH3 domain comprises Glu, Leu, Ser, Val, Trp, or Tyr at position 153; an aromatic amino acid (e.g., Tyr, Phe, or Trp), Met, Pro, or Val at position 157; Thr, Asn, or Val at position 159; Glu, Ile, Pro, or Val at position 160; an aliphatic amino acid (e.g., Ala, Ile, or Val), Ser, or Thr at position 162; Ser, Asn, Arg, or Thr at position 163; Thr, His, or Ser at position 186; Glu, Ser, Asp, Gly, Thr, Pro, Gln, or Arg at position 188; Glu or Arg at position 189; Phe, His, Lys, Tyr, or Trp at position 194; Ser, Thr, or Trp at position 197; and Ser, Cys, Pro, Met, or Trp at position 199. In certain embodiments, a modified CH3 domain polypeptide may comprise the sequence of SEQ ID NO:316. In certain embodiments, a modified CH3 domain polypeptide may comprise the sequence of SEQ ID NO:314. In certain embodiments, a modified CH3 domain polypeptide may comprise the sequence of SEQ ID NO:315.

[0220] In some embodiments, the modified CH3 domain polypeptide comprises Glu, Leu, or Trp at position 153; an aromatic amino acid at position 157; Thr at position 159; Glu at position 160; an aliphatic amino acid or Ser at position 162; Ser or Asn at position 163; Thr or Ser at position 186; Glu or Ser at position 188; Glu at position 189; Phe, His, Tyr, or Trp at position 194; Ser at position 197; and Ser at position 199, wherein the substitutions and the positions are determined with reference to the sequence of SEQ ID NO:13. In particular embodiments, the aromatic amino acid at position 157 is Tyr or Phe and the aliphatic amino acid at position 162 is Ala or Val. In certain embodiments, a modified CH3 domain polypeptide may comprise the sequence of SEQ ID NO:319. In certain embodiments, a modified CH3 domain polypeptide may comprise the sequence of SEQ ID NO:317. In certain embodiments, a modified CH3 domain polypeptide may comprise the sequence of SEQ ID NO:318.

[0221] In further embodiments, the modified CH3 domain polypeptide may comprise Glu, Leu, or Trp at position 153; Tyr or Phe at position 157; Thr at position 159; Glu at position 160; Ala, Val, or Ser at position 162; Ser or Asn at position 163; Thr or Ser at position 186; Glu or Ser at position 188; Glu at position 189; Phe at position 194; Ser at position 197; and Ser at position 199, wherein the substitutions and the positions are determined with reference to the sequence of SEQ ID NO:13. In certain embodiments, a modified CH3 domain polypeptide may comprise the sequence of SEQ ID NO:322. In certain embodiments, a modified CH3 domain polypeptide may comprise the sequence of SEQ ID NO:320. In certain embodiments, a modified CH3 domain polypeptide may comprise the sequence of SEQ ID NO:321.

[0222] In some embodiments, a modified CH3 domain polypeptide in accordance with the invention comprises only one substitution in a set of amino acid positions comprising 153, 157, 159, 160, 162, 163, 186, 188, 189, 194, 197, and 199; and wherein the substitutions and the positions are determined with reference to the sequence of SEQ ID NO:41. In some embodiments, the modified CH3 domain polypeptide comprises Glu, Leu, Ser, Val, Trp, or Tyr at position 153. The modified CH3 domain polypeptide may comprise Glu at position 153. The modified CH3 domain polypeptide may comprises Leu at position 153. The modified CH3 domain polypeptide may comprises Ser at position 153. The modified CH3 domain polypeptide may comprises Val at position 153. The modified CH3 domain polypeptide may Trp at position 153. The modified CH3 domain polypeptide may comprises Tyr at position 153. In some embodiments, the modified CH3 domain polypeptide comprises Tyr, Phe, Trp, Met, Pro, or Val at position 157. The modified CH3 domain polypeptide may comprise Tyr at position 157. The modified CH3 domain polypeptide may comprise Phe at position 157. The modified CH3 domain polypeptide may comprise Trp at position 157. The modified CH3 domain polypeptide may comprise Met at position 157. The modified CH3 domain polypeptide may comprise Pro at position 157. The modified CH3 domain polypeptide may comprise Val at position 157. In some embodiments, the modified CH3 domain polypeptide comprises Thr, Asn, or Val at position 159. The modified CH3 domain polypeptide may comprise Thr at position 159. The modified CH3 domain polypeptide may comprise Asn at position 159. The modified CH3 domain polypeptide may comprise Val at position 159. In some embodiments, the modified CH3 domain polypeptide comprises Glu, Ile, Pro, or Val at position 160. The modified CH3 domain polypeptide may comprise Glu at position 160. The modified CH3 domain polypeptide may comprise Ile at position 160. The modified CH3 domain polypeptide may comprise Pro at position 160. The modified CH3 domain polypeptide may comprise Val at position 160. In some embodiments, the modified CH3 domain polypeptide comprises Ala, Ile, Val, Ser, or Thr at position 162. The modified CH3 domain polypeptide may comprise Ala at position 162. The modified CH3 domain polypeptide may comprise Ile at position 162. The modified CH3 domain polypeptide may comprise Val at position 162. The modified CH3 domain polypeptide may comprise Ser at position 162. The modified CH3 domain polypeptide may comprise Thr at position 162. In some embodiments, the modified CH3 domain polypeptide comprises Ser, Asn, Arg, or Thr at position 163. The modified CH3 domain polypeptide may comprise Ser at position 163. The modified CH3 domain polypeptide may comprise Asn at position 163. The modified CH3 domain polypeptide may comprise Arg at position 163. The modified CH3 domain polypeptide may comprise Thr at position 163. In some embodiments, the modified CH3 domain polypeptide comprises Thr, His, or Ser at position 186. The modified CH3 domain polypeptide may comprise Thr at position 186. The modified CH3 domain polypeptide may comprise His at position 186. The modified CH3 domain polypeptide may comprise Ser at position 186. In some embodiments, the modified CH3 domain polypeptide comprises Glu, Ser, Asp, Gly, Thr, Pro, Gln, or Arg at position 188. The modified CH3 domain polypeptide may comprise Glu at position 188. The modified CH3 domain polypeptide may comprise Ser at position 188. The modified CH3 domain polypeptide may comprise Asp at position 188. The modified CH3 domain polypeptide may comprise Gly at position 188. The modified CH3 domain polypeptide may comprise Thr at position 188. The modified CH3 domain polypeptide may comprise Pro at position 188. The modified CH3 domain polypeptide may comprise Gln at position 188. The modified CH3 domain polypeptide may comprise Arg at position 188. In some embodiments, the modified CH3 domain polypeptide comprises Glu or Arg at position 189. The modified CH3 domain polypeptide may comprise Glu at position 189. The modified CH3 domain polypeptide may comprise Arg at position 189. In some embodiments, the modified CH3 domain polypeptide comprises Phe, His, Lys, Tyr, or Trp at position 194. The modified CH3 domain polypeptide may comprise Phe at position 194. The modified CH3 domain polypeptide may comprise His at position 194. The modified CH3 domain polypeptide may comprise Lys at position 194. The modified CH3 domain polypeptide may comprise Tyr at position 194. The modified CH3 domain polypeptide may comprise Trp at position 194. In some embodiments, the modified CH3 domain polypeptide comprises Ser, Thr, or Trp at position 197. The modified CH3 domain polypeptide may comprise Ser at position 197. The modified CH3 domain polypeptide may comprise Thr at position 197. The modified CH3 domain polypeptide may comprise Trp at position 197. In some embodiments, the modified CH3 domain polypeptide comprises Ser, Cys, Pro, Met, or Trp at position 199. The modified CH3 domain polypeptide may comprise Ser at position 199. The modified CH3 domain polypeptide may comprise Cys at position 199. The modified CH3 domain polypeptide may comprise Pro at position 199. The modified CH3 domain polypeptide may comprise Met at position 199. The modified CH3 domain polypeptide may comprise Trp at position 199. A modified CH3 domain polypeptide may have the sequence of any one of SEQ ID NOS:323-334.

[0223] In some embodiments, a modified CH3 domain polypeptide in accordance with the invention comprises one or more substitutions in a set of amino acid positions comprising 153, 157, 159, 160, 162, 163, 164, 186, 189, and 194; and wherein the substitutions and the positions are determined with reference to the sequence of SEQ ID NO:9. In some embodiments, the modified CH3 domain comprises Glu or Trp at position 153; Val, Trp, Leu, or Tyr at position 157; Leu, Pro, Phe, Thr, or His at position 159; Pro, Val, or Glu at position 160; Ala, Ser, Val, or Gly at position 162; Leu, His, Gln, Gly, Val, Ala, Asn, Asp, Thr, or Glu at position 163; Thr, Phe, Gln, Val, or Tyr at position 164; Leu, Ser, Glu, Ala, or Pro at position 186; Glu, Asp, Thr, or Asn at position 189; and Trp, Tyr, Phe, or His at position 194. In certain embodiments, a modified CH3 domain polypeptide may comprise the sequence of SEQ ID NO:337. In certain embodiments, a modified CH3 domain polypeptide may comprise the sequence of SEQ ID NO:335. In certain embodiments, a modified CH3 domain polypeptide may comprise the sequence of SEQ ID NO:336.

[0224] In some embodiments, the modified CH3 domain polypeptide comprises Glu or Trp at position 153; Trp, Leu, or Tyr at position 157; Thr or His at position 159; Val at position 160; Ala, Ser, or Val at position 162; Val, Asn, or Thr at position 163; Gln or Tyr at position 164; Pro at position 186; Thr or Asn at position 189; and Trp, Tyr, Phe, or His at position 194, wherein the substitutions and the positions are determined with reference to the sequence of SEQ ID NO:9. In certain embodiments, a modified CH3 domain polypeptide may comprise the sequence of SEQ ID NO:340. In certain embodiments, a modified CH3 domain polypeptide may comprise the sequence of SEQ ID NO:338. In certain embodiments, a modified CH3 domain polypeptide may comprise the sequence of SEQ ID NO:339.

[0225] In additional embodiments, a transferrin receptor-binding polypeptide comprises amino acids 157-194, amino acids 153-194, or amino acids 153-199, of any one of SEQ ID NOS:4-29, 39-102, and 182-195. In further embodiments, the polypeptide comprises an amino acid sequence having at least 75% identity, at least 80% identity, at least 85% identity, at least 90% identity, or at least 95% identity to amino acids 157-194 of any one of SEQ ID NOS:4-29, 39-102, and 182-195, or to amino acids 153-194, or to amino acids 153-199, of any one of SEQ ID NOS:4-29, 39-102, and 182-195.

[0226] In some embodiments, the polypeptide comprises any one of SEQ ID NOS:4-29, 39-102, and 182-195. In further embodiments, the polypeptide comprises any one of SEQ ID NOS:4-29, 39-102, and 182-195 without the first three amino acids “PCP” at the amino-terminal end. In further embodiments, the polypeptide may have at least 75% identity, at least 80% identity, at least 85% identity, at least 90% identity, or at least 95% identity to any one of SEQ ID NOS:4-29, 39-102, and 182-195 as determined without the first three amino acids “PCP” at the amino-terminal end.

### Illustrative Polypeptides Comprising Modified CH3 Domains

[0227] A modified CH3 domain polypeptide of the present invention may be joined to another domain of an Fc region. In some embodiments, a modified CH3 domain polypeptide of the present invention is joined to a CH2 domain, which may be a naturally occurring CH2 domain or a variant CH2 domain, typically at the C-terminal end of the CH2 domain. In some embodiments, the polypeptide comprising a modified CH3 domain joined to a CH2 domain further comprises a partial or full hinge region of an antibody, thus resulting in a format in which the modified CH3 domain polypeptide is part of an Fc region having a partial or full hinge region. The hinge region can be from any immunoglobulin subclass or isotype. An illustrative immunoglobulin hinge is an IgG hinge region, such as an IgG1 hinge region, e.g., human IgG1 hinge amino acid sequence EPKSCDKTHTCPPCP (SEQ ID NO:37). In further embodiments, the polypeptide, which may be in an Fc format containing a hinge or partial hinge region, is further joined to another moiety, for example, a Fab fragment, thus generating a transferrin receptor-binding Fc-Fab fusion. In some embodiments, the transferrin receptor-binding Fc-Fab fusion comprises a modified CH3 domain polypeptide, a hinge region, and a Fab fragment. The Fab fragment may be to any target of interest, e.g., a therapeutic neurological target, where the Fab is delivered to the target by transcytosis across the blood-brain barrier mediated by the binding of the modified CH3 domain polypeptide to the transferrin receptor.

[0228] In some embodiments, a Fab fragment joined to a transferrin receptor-binding polypeptide may bind to a Tau protein (e.g., a human Tau protein) or a fragment thereof In some embodiments, the Fab fragment may bind to a phosphorylated Tau protein, an unphosphorylated Tau protein, a splice isoform of Tau protein, an N-terminal truncated Tau protein, a C-terminal truncated Tau protein, and/or a fragment thereof

[0229] In some embodiments, a Fab fragment joined to a transferrin receptor-binding polypeptide may bind to a beta-secretase 1 (BACE1) protein (e.g., a human BACE1 protein) or a fragment thereof. In some embodiments, the Fab fragment may bind to one or more splice isoforms of BACE1 protein or a fragment thereof.

[0230] In some embodiments, a Fab fragment joined to a transferrin receptor-binding polypeptide may bind to a triggering receptor expressed on myeloid cells 2 (TREM2) protein (e.g., a human TREM2 protein) or a fragment thereof.

[0231] In some embodiments, a Fab fragment joined to a transferrin receptor-binding polypeptide may bind to an alpha-synuclein protein (e.g., a human alpha-synuclein protein) or a fragment thereof. In some embodiments, the Fab fragment may bind to a monomeric alpha-synuclein, oligomeric alpha-synuclein, alpha-synuclein fibrils, soluble alpha-synuclein, and/or a fragment thereof.

[0232] In some embodiments, an Fc-Fab fusion comprising a modified CH3 domain polypeptide of the present invention is a subunit of a dimer. In some embodiments, the dimer is a heterodimer. In some embodiments, the dimer is a homodimer. In some embodiments, the dimer comprises a single polypeptide that binds to the transferrin receptor, i.e., is monovalent for transferrin receptor binding. In some embodiments, the dimer comprises a second polypeptide that binds to the transferrin receptor. The second polypeptide may comprise the same modified CH3 domain polypeptide present in the Fc-Fab fusion to provide a bivalent binding homodimer, or a second modified CH3 domain polypeptide of the present invention may provide a second transferrin receptor binding site. In some embodiments, the dimer comprises a first subunit comprising a modified CH3 domain polypeptide and a second subunit comprising CH2 and CH3 domains where neither binds transferrin receptor.

[0233] The transferrin receptor-binding polypeptide may also be fused to a different polypeptide of interest other than a Fab. For example, in some embodiments, the transferrin receptor-binding polypeptide may be fused to a different polypeptide that is desirable to target to a transferrin receptor-expressing cell or to deliver across an endothelium, e.g., the blood-brain barrier, by trancytosis. In some embodiments, the transferrin receptor-binding polypeptide is fused to a soluble protein, e.g., an extracellular domain of a receptor or a growth factor, a cytokine, or an enzyme.

[0234] In still other embodiments, the transferrin receptor-binding polypeptide may be fused to a peptide or protein useful in protein purification, e.g, polyhistidine, epitope tags, e.g., FLAG, c-Myc, hemagglutinin tags and the like, glutathione S transferase (GST), thioredoxin, protein A, protein G, or maltose binding protein (MBP). In some cases, the peptide or protein to which the transferrin receptor-binding polypeptide is fused may comprise a protease cleavage site, such as a cleavage site for Factor Xa or Thrombin.

[0235] Transferrin receptor-binding polypeptides of the present invention may have a broad range of binding affinities, e.g., based on the format of the polypeptide. For example, in some embodiments, a polypeptide comprising a modified CH3 domain has an affinity for transferrin receptor binding ranging anywhere from 1 pM to 10 μM. In some embodiments, affinity may be measured in a monovalent format. In other embodiments, affinity may be measured in a bivalent format, e.g., as a dimer comprising a polypeptide-Fab fusion protein.

[0236] Methods for analyzing binding affinity, binding kinetics, and cross-reactivity are known in the art. These methods include, but are not limited to, solid-phase binding assays (e.g., ELISA assay), immunoprecipitation, surface plasmon resonance (e.g., Biacore™ (GE Healthcare, Piscataway, N.J.)), kinetic exclusion assays (e.g., KinExA®), flow cytometry, fluorescence-activated cell sorting (FACS), BioLayer interferometry (e.g., Octet® (FortéBio, Inc., Menlo Park, Calif.)), and Western blot analysis. In some embodiments, ELISA is used to determine binding affinity and/or cross-reactivity. Methods for performing ELISA assays are known in the art and are also described in the Example section below. In some embodiments, surface plasmon resonance (SPR) is used to determine binding affinity, binding kinetics, and/or cross-reactivity. In some embodiments, kinetic exclusion assays are used to determine binding affinity, binding kinetics, and/or cross-reactivity. In some embodiments, BioLayer interferometry assays are used to determine binding affinity, binding kinetics, and/or cross-reactivity.

Additional Mutations in an Fc Region that Comprises a Modified CH3 Domain Polypeptide

[0237] A polypeptide as provided herein that is modified to bind a transferrin receptor and initiate transport across the BBB may also comprise additional mutations, e.g., to increase serum stability, to modulate effector function, to influence glyscosylation, to reduce immunogenicity in humans, and/or to provide for knob and hole heterodimerization of the polypeptide.

[0238] In some embodiments, a polypeptide in accordance with the invention has an amino acid sequence identity of at least about 75%, 76%, 77%, 78%, 79%, 80%, 81%, 82%, 83%, 84%, 85%, 86%, 87%, 88%, 89%, 90%, 91%, 92%, 93%, 94%, 95%, 96%, 97%, 98%, or 99% to a corresponding wild-type Fc region (e.g., a human IgG1, IgG2, IgG3, or IgG4 Fc region).

[0239] A polypeptide in accordance with the invention may also have other mutations introduced outside of the specified sets of amino acids, e.g., to influence glyscosylation, to increase serum half-life or, for CH3 domains, to provide for knob and hole heterodimerization of polypeptides that comprise the modified CH3 domain. Generally, the method involves introducing a protuberance (“knob”) at the interface of a first polypeptide and a corresponding cavity (“hole”) in the interface of a second polypeptide, such that the protuberance can be positioned in the cavity so as to promote heterodimer formation and hinder homodimer formation. Protuberances are constructed by replacing small amino acid side chains from the interface of the first polypeptide with larger side chains (e.g., tyrosine or tryptophan). Compensatory cavities of identical or similar size to the protuberances are created in the interface of the second polypeptide by replacing large amino acid side chains with smaller ones (e.g., alanine or threonine). Such additional mutations are at a position in the polypeptide that does not have a negative effect on binding of the modified CH3 domain to the transferrin receptor.

[0240] In one illustrative embodiment of a knob and hole approach for dimerization, a position corresponding to position 139 of SEQ ID NO:1 of a first Fc polypeptide subunit to be dimerized has a tryptophan in place of a native threonine and a second Fc polypeptide subunit of the dimer has a valine at a position corresponding to position 180 of SEQ ID NO:1 in place of the native tyrosine. The second subunit of the Fc polypeptide may further comprise a substitution in which the native threonine at the position corresponding to position 139 of SEQ ID NO:1 is substituted with a serine and a native leucine at the position corresponding to position 141 of SEQ ID NO:1 is substituted with an alanine.

[0241] A polypeptide as described herein may also be engineered to contain other modifications for heterodimerization, e.g., electrostatic engineering of contact resdiues within a CH3-CH3 interface that are naturally charged or hydrophobic patch modifications.

[0242] In some embodiments, modifications to enhance serum half-life may be introduced. For example, in some embodiments, an Fc region comprises a CH2 domain comprising a Tyr at a position corresponding to position 25 of SEQ ID NO:1, Thr at a position corresponding to 27 of SEQ ID NO:1, and Glu at a position corresponding to position 29 of SEQ ID NO:1.

[0243] In some embodiments, a mutation, e.g., a substitution, is introduced at one or more of positions 17-30, 52-57, 80-90, 156-163, and 201-208 as determined with reference to SEQ ID NO:1. In some embodiments, one or more mutations are introduced at positions 24, 25, 27, 28, 29, 80, 81, 82, 84, 85, 87, 158, 159, 160, 162, 201, 206, 207, or 209 as determined with reference to SEQ ID NO:1. In some embodiments, mutations are introduced into one, two, or three of positions 25, 27, and 29 as determined with reference to SEQ ID NO:1. In some embodiments, the mutations are M25Y, S27T, and T29E as numbered with reference to SEQ ID NO:1. In some embodiments, a polypeptide as described herein further comprises mutations M25Y, S27T, and T29E. In some embodiments, mutations are introduced into one or two of positions 201 and 207 as determined with reference to SEQ ID NO:1. In some embodiments, the mutations are M201L and N2075 as numbered with reference to SEQ ID NO:1. In some embodiments, a polypeptide as described herein further comprises mutation N2075 with or without M201L. In some embodiments, a polypeptide as described herein comprises a substitution at one, two or all three of positions T80, E153, and N207 as numbered with reference to SEQ ID NO:1. In some embodiments, the mutations are T80Q and N207A. In some embodiments, a polypeptide as described herein comprises mutations T80A, E153A, and N207A. In some embodiments, a polypeptide as described herein comprises substitutions at positions T23 and M201 as numbered with reference to SEQ ID NO:1. In some embodiments, a polypeptide as described herein comprises mutations T23Q and M201L. In some embodiments, a polypeptide as described herein comprises substitutions at positions M201 and N207 as numbered with reference to SEQ ID NO:1. In some embodiments, a polypeptide as described herein comprises substitutions M201L and N2075. In some embodiments, a polypeptide as described herein comprises an N2075 or N207A substitution.

[0244] Fc Effector Functions

[0245] In some embodiments, an Fc region comprising a modified CH3 domain has an effector function, i.e., the Fc region has the ability to induce certain biological functions upon binding to an Fc receptor expressed on an effector cell that mediates the effector function. Effector cells include, but are not limited to, monocytes, macrophages, neutrophils, dendritic cells, eosinophils, mast cells, platelets, B cells, large granular lymphocytes, Langerhans' cells, natural killer (NK) cells, and cytotoxic T cells.

[0246] Examples of antibody effector functions include, but are not limited to, C1q binding and complement dependent cytotoxicity (CDC), Fc receptor binding, antibody-dependent cell-mediated cytotoxicity (ADCC), antibody-dependent cell-mediated phagocytosis (ADCP), down-regulation of cell surface receptors (e.g., B cell receptor), and B-cell activation. Effector functions may vary with the antibody class. For example, native human IgG1 and IgG3 antibodies can elicit ADCC and CDC activities upon binding to an appropriate Fc receptor present on an immune system cell; and native human IgG1, IgG2, IgG3, and IgG4 can elicit ADCP functions upon binding to the appropriate Fc receptor present on an immune cell.

[0247] In some embodiments, a polypeptide as described herein may include additional modifications that reduce effector function. Alternatively, in some embodiments, a polypeptide comprising a modified CH3 domain of the invention may include additional modifications that enhance effector function.

[0248] Illustrative Fc polypeptide mutations that modulate an effector function include, but are not limited to, substitutions in a CH2 domain, e.g., at positions corresponding to positions 7 and 8 of SEQ ID NO:1. In some embodiments, the substitutions in a CH2 domain comprise Ala at positions 7 and 8 of SEQ ID NO:1. In some embodiments, the substitutions in a CH2 domain comprise Ala at positions 7 and 8 and Gly at position 102 of SEQ ID NO:1.

[0249] Additional Fc polypeptide mutations that modulate an effector function include, but are not limited to, one or more substitutions at positions 238, 265, 269, 270, 297, 327 and 329 (EU numbering scheme, which correspond to positions 11, 38, 42, 43, 70, 100, and 102 as numbered with reference to SEQ ID NO:1). Illustrative substitutions (as numbered with EU numbering scheme), include the following: position 329 may have a mutation in which proline is substituted with a glycine or arginine or an amino acid residue large enough to destroy the Fc/Fcy receptor interface that is formed between proline 329 of the Fc and tryptophan residues Trp 87 and Trp 110 of FcyRIII Additional illustrative substitutions include S228P, E233P, L235E, N297A, N297D, and P331S. Multiple substitutions may also be present, e.g., L234A and L235A of a human IgG1 Fc region; L234A, L235A, and P329G of a human IgG1 Fc region; S228P and L235E of a human IgG4 Fc region; L234A and G237A of a human IgG1 Fc region; L234A, L235A, and G237A of a human IgG1 Fc region; V234A and G237A of a human IgG2 Fc region; L235A, G237A, and E318A of a human IgG4 Fc region; and S228P and L236E of a human IgG4 Fc region. In some embodiments, a polypeptide of the invention may have one or more amino acid substitutions that modulate ADCC, e.g., substitutions at positions 298, 333, and/or 334 of the Fc region, according to the EU numbering scheme.

[0250] In some embodiments, a polypeptide as described herein may have one or more amino acid substitutions that increase or decrease ADCC or may have mutations that alter C1q binding and/or CDC.

[0251] Illustrative Polypeptides Comprising Additional Mutations

[0252] A polypeptide as described herein (e.g., any one of clones CH3C.35.20.1, CH3C.35.23.2, CH3C.35.23.3, CH3C.35.23.4, CH3C.35.21.17.2, CH3C.35.23, CH3C.35.21, CH3C.35.20.1.1, CH3C.23.2.1, and CH3C.35.23.1.1) may comprise additional mutations including a knob mutation (e.g., T139W as numbered with reference to SEQ ID NO:1), hole mutations (e.g., T1395, L141A, and Y180V as numbered with reference to SEQ ID NO:1), mutations that modulate effector function (e.g., L7A, L8A, and/or P102G (e.g., L7A and L8A) as numbered with reference to SEQ ID NO:1), and/or mutations that increase serum stability (e.g., (i) M25Y, S27T, and T29E as numbered with reference to SEQ ID NO:1, or (ii) N2075 with or without M201L as numbered with reference to SEQ ID NO:1).

[0253] In some embodiments, a polypeptide as described herein (e.g., any one of clones CH3C.35.20.1, CH3C.35.23.2, CH3C.35.23.3, CH3C.35.23.4, CH3C.35.21.17.2, CH3C.35.23, CH3C.35.21, CH3C.35.20.1.1, CH3C.23.2.1, and CH3C.35.23.1.1) may have a knob mutation (e.g., T139W as numbered with reference to SEQ ID NO:1) and at least 85% identity, at least 90% identity, or at least 95% identity to the sequence of any one of SEQ ID NOS:4-29, 39-102, and 182-195. In some embodiments, a polypeptide having the sequence of any one of SEQ ID NOS:4-29, 39-102, and 182-195 may be modified to have a knob mutation.

[0254] In some embodiments, a polypeptide as described herein (e.g., any one of clones CH3C.35.20.1, CH3C.35.23.2, CH3C.35.23.3, CH3C.35.23.4, CH3C.35.21.17.2, CH3C.35.23, CH3C.35.21, CH3C.35.20.1.1, CH3C.23.2.1, and CH3C.35.23.1.1) may have a knob mutation (e.g., T139W as numbered with reference to SEQ ID NO:1), mutations that modulate effector function (e.g., L7A, L8A, and/or P102G (e.g., L7A and L8A) as numbered with reference to SEQ ID NO:1), and at least 85% identity, at least 90% identity, or at least 95% identity to the sequence of any one of SEQ ID NOS:4-29, 39-102, and 182-195. In some embodiments, a polypeptide having the sequence of any one of SEQ ID NOS:4-29, 39-102, and 182-195 may be modified to have a knob mutation and mutations that modulate effector function.

[0255] In some embodiments, a polypeptide as described herein (e.g., any one of clones CH3C.35.20.1, CH3C.35.23.2, CH3C.35.23.3, CH3C.35.23.4, CH3C.35.21.17.2, CH3C.35.23, CH3C.35.21, CH3C.35.20.1.1, CH3C.23.2.1, and CH3C.35.23.1.1) may have a knob mutation (e.g., T139W as numbered with reference to SEQ ID NO:1), mutations that increase serum stability (e.g., (i) M25Y, S27T, and T29E as numbered with reference to SEQ ID NO:1, or (ii) N2075 with or without M201L as numbered with reference to SEQ ID NO:1), and at least 85% identity, at least 90% identity, or at least 95% identity to the sequence of any one of SEQ ID NOS:4-29, 39-102, and 182-195. In some embodiments, a polypeptide having the sequence of any one of SEQ ID NOS:4-29, 39-102, and 182-195 may be modified to have a knob mutation and mutations that increase serum stability.

[0256] In some embodiments, a polypeptide as described herein (e.g., any one of clones CH3C.35.20.1, CH3C.35.23.2, CH3C.35.23.3, CH3C.35.23.4, CH3C.35.21.17.2, CH3C.35.23, CH3C.35.21, CH3C.35.20.1.1, CH3C.23.2.1, and CH3C.35.23.1.1) may have a knob mutation (e.g., T139W as numbered with reference to SEQ ID NO:1), mutations that modulate effector function (e.g., L7A, L8A, and/or P102G (e.g., L7A and L8A) as numbered with reference to SEQ ID NO:1), mutations that increase serum stability (e.g., (i) M25Y, S27T, and T29E as numbered with reference to SEQ ID NO:1, or (ii) N2075 with or without M201L as numbered with reference to SEQ ID NO:1), and at least 85% identity, at least 90% identity, or at least 95% identity to the sequence of any one of SEQ ID NOS:4-29, 39-102, and 182-195. In some embodiments, a polypeptide having the sequence of any one of SEQ ID NOS:4-29, 39-102, and 182-195 may be modified to have a knob mutation, mutations that modulate effector function, and mutations that increase serum stability.

[0257] In some embodiments, a polypeptide as described herein (e.g., any one of clones CH3C.35.20.1, CH3C.35.23.2, CH3C.35.23.3, CH3C.35.23.4, CH3C.35.21.17.2, CH3C.35.23, CH3C.35.21, CH3C.35.20.1.1, CH3C.23.2.1, and CH3C.35.23.1.1) may have hole mutations (e.g., T1395, L141A, and Y180V as numbered with reference to SEQ ID NO:1) and at least 85% identity, at least 90% identity, or at least 95% identity to the sequence of any one of SEQ ID NOS:4-29, 39-102, and 182-195. In some embodiments, a polypeptide having the sequence of any one of SEQ ID NOS:4-29, 39-102, and 182-195 may be modified to have hole mutations.

[0258] In some embodiments, a polypeptide as described herein (e.g., any one of clones CH3C.35.20.1, CH3C.35.23.2, CH3C.35.23.3, CH3C.35.23.4, CH3C.35.21.17.2, CH3C.35.23, CH3C.35.21, CH3C.35.20.1.1, CH3C.23.2.1, and CH3C.35.23.1.1) may have hole mutations (e.g., T1395, L141A, and Y180V as numbered with reference to SEQ ID NO:1), mutations that modulate effector function (e.g., L7A, L8A, and/or P102G (e.g., L7A and L8A) as numbered with reference to SEQ ID NO:1), and at least 85% identity, at least 90% identity, or at least 95% identity to the sequence of any one of SEQ ID NOS:4-29, 39-102, and 182-195. In some embodiments, a polypeptide having the sequence of any one of SEQ ID NOS:4-29, 39-102, and 182-195 may be modified to have hole mutations and mutations that modulate effector function.

[0259] In some embodiments, a polypeptide as described herein (e.g., any one of clones CH3C.35.20.1, CH3C.35.23.2, CH3C.35.23.3, CH3C.35.23.4, CH3C.35.21.17.2, CH3C.35.23, CH3C.35.21, CH3C.35.20.1.1, CH3C.23.2.1, and CH3C.35.23.1.1) may have hole mutations (e.g., T1395, L141A, and Y180V as numbered with reference to SEQ ID NO:1), mutations that increase serum stability (e.g., (i) M25Y, S27T, and T29E as numbered with reference to SEQ ID NO:1, or (ii) N2075 with or without M201L as numbered with reference to SEQ ID NO:1), and at least 85% identity, at least 90% identity, or at least 95% identity to the sequence of any one of SEQ ID NOS:4-29, 39-102, and 182-195. In some embodiments, a polypeptide having the sequence of any one of SEQ ID NOS:4-29, 39-102, and 182-195 may be modified to have hole mutations and mutations that increase serum stability.

[0260] In some embodiments, a polypeptide as described herein (e.g., any one of clones CH3C.35.20.1, CH3C.35.23.2, CH3C.35.23.3, CH3C.35.23.4, CH3C.35.21.17.2, CH3C.35.23, CH3C.35.21, CH3C.35.20.1.1, CH3C.23.2.1, and CH3C.35.23.1.1) may have hole mutations (e.g., T1395, L141A, and Y180V as numbered with reference to SEQ ID NO:1), mutations that modulate effector function (e.g., L7A, L8A, and/or P102G (e.g., L7A and L8A) as numbered with reference to SEQ ID NO:1), mutations that increase serum stability (e.g., (i) M25Y, S27T, and T29E as numbered with reference to SEQ ID NO:1, or (ii) N2075 with or without M201L as numbered with reference to SEQ ID NO:1), and at least 85% identity, at least 90% identity, or at least 95% identity to the sequence of any one of SEQ ID NOS:4-29, 39-102, and 182-195. In some embodiments, a polypeptide having the sequence of any one of SEQ ID NOS:4-29, 39-102, and 182-195 may be modified to have hole mutations, mutations that modulate effector function, and mutations that increase serum stability.

[0261] Clone CH3C.35.20.1

[0262] In some embodiments, clone CH3C.35.20.1 may have a knob mutation (e.g., T139W as numbered with reference to SEQ ID NO:1) and at least 85% identity, at least 90% identity, or at least 95% identity to the sequence of SEQ ID NO:109. In some embodiments, clone CH3C.35.20.1 with the knob mutation has the sequence of SEQ ID NO:109.

[0263] In some embodiments, clone CH3C.35.20.1 may have a knob mutation (e.g., T139W as numbered with reference to SEQ ID NO:1), mutations that modulate effector function (e.g., L7A, L8A, and/or P102G (e.g., L7A and L8A) as numbered with reference to SEQ ID NO:1), and at least 85% identity, at least 90% identity, or at least 95% identity to the sequence of SEQ ID NO:110 or 111. In some embodiments, clone CH3C.35.20.1 with the knob mutation and the mutations that modulate effector function has the sequence of SEQ ID NO:110 or 111.

[0264] In some embodiments, clone CH3C.35.20.1 may have a knob mutation (e.g., T139W as numbered with reference to SEQ ID NO:1), mutations that increase serum stability (e.g., M25Y, S27T, and T29E as numbered with reference to SEQ ID NO:1), and at least 85% identity, at least 90% identity, or at least 95% identity to the sequence of SEQ ID NO:112. In some embodiments, clone CH3C.35.20.1 with the knob mutation and the mutations that increase serum stability has the sequence of SEQ ID NO:112.

[0265] In some embodiments, clone CH3C.35.20.1 may have a knob mutation (e.g., T139W as numbered with reference to SEQ ID NO:1), mutations that increase serum stability (e.g., N2075 with or without M201L as numbered with reference to SEQ ID NO:1), and at least 85% identity, at least 90% identity, or at least 95% identity to the sequence of SEQ ID NO:245. In some embodiments, clone CH3C.35.20.1 with the knob mutation and the mutations that increase serum stability has the sequence of SEQ ID NO:245.

[0266] In some embodiments, clone CH3C.35.20.1 may have a knob mutation (e.g., T139W as numbered with reference to SEQ ID NO:1), mutations that modulate effector function (e.g., L7A, L8A, and/or P102G (e.g., L7A and L8A) as numbered with reference to SEQ ID NO:1), mutations that increase serum stability (e.g., M25Y, S27T, and T29E as numbered with reference to SEQ ID NO:1), and at least 85% identity, at least 90% identity, or at least 95% identity to the sequence of SEQ ID NO:113 or 114. In some embodiments, clone CH3C.35.20.1 with the knob mutation, the mutations that modulate effector function, and the mutations that increase serum stability has the sequence of SEQ ID NO:113 or 114.

[0267] In some embodiments, clone CH3C.35.20.1 may have a knob mutation (e.g., T139W as numbered with reference to SEQ ID NO:1), mutations that modulate effector function (e.g., L7A, L8A, and/or P102G (e.g., L7A and L8A) as numbered with reference to SEQ ID NO:1), mutations that increase serum stability (e.g., N2075 with or without M201L as numbered with reference to SEQ ID NO:1), and at least 85% identity, at least 90% identity, or at least 95% identity to the sequence of SEQ ID NO:246 or 247. In some embodiments, clone CH3C.35.20.1 with the knob mutation, the mutations that modulate effector function, and the mutations that increase serum stability has the sequence of SEQ ID NO:246 or 247.

[0268] In some embodiments, clone CH3C.35.20.1 may have hole mutations (e.g., T139S, L141A, and Y180V as numbered with reference to SEQ ID NO:1) and at least 85% identity, at least 90% identity, or at least 95% identity to the sequence of SEQ ID NO:115. In some embodiments, clone CH3C.35.20.1 with the hole mutations has the sequence of SEQ ID NO:115.

[0269] In some embodiments, clone CH3C.35.20.1 may have hole mutations (e.g., T139S, L141A, and Y180V as numbered with reference to SEQ ID NO:1), mutations that modulate effector function (e.g., L7A, L8A, and/or P102G (e.g., L7A and L8A) as numbered with reference to SEQ ID NO:1), and at least 85% identity, at least 90% identity, or at least 95% identity to the sequence of SEQ ID NO:116 or 117. In some embodiments, clone CH3C.35.20.1 with the hole mutations and the mutations that modulate effector function has the sequence of SEQ ID NO:116 or 117.

[0270] In some embodiments, clone CH3C.35.20.1 may have hole mutations (e.g., T139S, L141A, and Y180V as numbered with reference to SEQ ID NO:1), mutations that increase serum stability (e.g., M25Y, S27T, and T29E as numbered with reference to SEQ ID NO:1), and at least 85% identity, at least 90% identity, or at least 95% identity to the sequence of SEQ ID NO:118. In some embodiments, clone CH3C.35.20.1 with the hole mutations and the mutations that increase serum stability has the sequence of SEQ ID NO:118.

[0271] In some embodiments, clone CH3C.35.20.1 may have hole mutations (e.g., T139S, L141A, and Y180V as numbered with reference to SEQ ID NO:1), mutations that increase serum stability (e.g., N207S with or without M201L as numbered with reference to SEQ ID NO:1), and at least 85% identity, at least 90% identity, or at least 95% identity to the sequence of SEQ ID NO:248. In some embodiments, clone CH3C.35.20.1 with the hole mutations and the mutations that increase serum stability has the sequence of SEQ ID NO:248.

[0272] In some embodiments, clone CH3C.35.20.1 may have hole mutations (e.g., T1395, L141A, and Y180V as numbered with reference to SEQ ID NO:1), mutations that modulate effector function (e.g., L7A, L8A, and/or P102G (e.g., L7A and L8A) as numbered with reference to SEQ ID NO:1), mutations that increase serum stability (e.g., M25Y, S27T, and T29E as numbered with reference to SEQ ID NO:1), and at least 85% identity, at least 90% identity, or at least 95% identity to the sequence of SEQ ID NO:119 or 120. In some embodiments, clone CH3C.35.20.1 with the hole mutations, the mutations that modulate effector function, and the mutations that increase serum stability has the sequence of SEQ ID NO:119 or 120.

[0273] In some embodiments, clone CH3C.35.20.1 may have hole mutations (e.g., T1395, L141A, and Y180V as numbered with reference to SEQ ID NO:1), mutations that modulate effector function (e.g., L7A, L8A, and/or P102G (e.g., L7A and L8A) as numbered with reference to SEQ ID NO:1), mutations that increase serum stability (e.g., N2075 with or without M201L as numbered with reference to SEQ ID NO:1), and at least 85% identity, at least 90% identity, or at least 95% identity to the sequence of SEQ ID NO:249 or 250. In some embodiments, clone CH3C.35.20.1 with the hole mutations, the mutations that modulate effector function, and the mutations that increase serum stability has the sequence of SEQ ID NO:249 or 250.

[0274] Clone CH3C.35.23.2

[0275] In some embodiments, clone CH3C.35.23.2 may have a knob mutation (e.g., T139W as numbered with reference to SEQ ID NO:1) and at least 85% identity, at least 90% identity, or at least 95% identity to the sequence of SEQ ID NO:121. In some embodiments, clone CH3C.35.23.2 with the knob mutation has the sequence of SEQ ID NO:121.

[0276] In some embodiments, clone CH3C.35.23.2 may have a knob mutation (e.g., T139W as numbered with reference to SEQ ID NO:1), mutations that modulate effector function (e.g., L7A, L8A, and/or P102G (e.g., L7A and L8A) as numbered with reference to SEQ ID NO:1), and at least 85% identity, at least 90% identity, or at least 95% identity to the sequence of SEQ ID NO:122 or 123. In some embodiments, clone CH3C.35.23.2 with the knob mutation and the mutations that modulate effector function has the sequence of SEQ ID NO:122 or 123.

[0277] In some embodiments, clone CH3C.35.23.2 may have a knob mutation (e.g., T139W as numbered with reference to SEQ ID NO:1), mutations that increase serum stability (e.g., M25Y, S27T, and T29E as numbered with reference to SEQ ID NO:1), and at least 85% identity, at least 90% identity, or at least 95% identity to the sequence of SEQ ID NO:124. In some embodiments, clone CH3C.35.23.2 with the knob mutation and the mutations that increase serum stability has the sequence of SEQ ID NO:124.

[0278] In some embodiments, clone CH3C.35.23.2 may have a knob mutation (e.g., T139W as numbered with reference to SEQ ID NO:1), mutations that increase serum stability (e.g., N2075 with or without M201L as numbered with reference to SEQ ID NO:1), and at least 85% identity, at least 90% identity, or at least 95% identity to the sequence of SEQ ID NO:252. In some embodiments, clone CH3C.35.23.2 with the knob mutation and the mutations that increase serum stability has the sequence of SEQ ID NO:252.

[0279] In some embodiments, clone CH3C.35.23.2 may have a knob mutation (e.g., T139W as numbered with reference to SEQ ID NO:1), mutations that modulate effector function (e.g., L7A, L8A, and/or P102G (e.g., L7A and L8A) as numbered with reference to SEQ ID NO:1), mutations that increase serum stability (e.g., M25Y, S27T, and T29E as numbered with reference to SEQ ID NO:1), and at least 85% identity, at least 90% identity, or at least 95% identity to the sequence of SEQ ID NO:125 or 126. In some embodiments, clone CH3C.35.23.2 with the knob mutation, the mutations that modulate effector function, and the mutations that increase serum stability has the sequence of SEQ ID NO:125 or 126.

[0280] In some embodiments, clone CH3C.35.23.2 may have a knob mutation (e.g., T139W as numbered with reference to SEQ ID NO:1), mutations that modulate effector function (e.g., L7A, L8A, and/or P102G (e.g., L7A and L8A) as numbered with reference to SEQ ID NO:1), mutations that increase serum stability (e.g., N2075 with or without M201L as numbered with reference to SEQ ID NO:1), and at least 85% identity, at least 90% identity, or at least 95% identity to the sequence of SEQ ID NO:253 or 254. In some embodiments, clone CH3C.35.23.2 with the knob mutation, the mutations that modulate effector function, and the mutations that increase serum stability has the sequence of SEQ ID NO:253 or 254.

[0281] In some embodiments, clone CH3C.35.23.2 may have hole mutations (e.g., T1395, L141A, and Y180V as numbered with reference to SEQ ID NO:1) and at least 85% identity, at least 90% identity, or at least 95% identity to the sequence of SEQ ID NO:127. In some embodiments, clone CH3C.35.23.2 with the hole mutations has the sequence of SEQ ID NO:127.

[0282] In some embodiments, clone CH3C.35.23.2 may have hole mutations (e.g., T1395, L141A, and Y180V as numbered with reference to SEQ ID NO:1), mutations that modulate effector function (e.g., L7A, L8A, and/or P102G (e.g., L7A and L8A) as numbered with reference to SEQ ID NO:1), and at least 85% identity, at least 90% identity, or at least 95% identity to the sequence of SEQ ID NO:128 or 129. In some embodiments, clone CH3C.35.23.2 with the hole mutations and the mutations that modulate effector function has the sequence of SEQ ID NO:128 or 129.

[0283] In some embodiments, clone CH3C.35.23.2 may have hole mutations (e.g., T1395, L141A, and Y180V as numbered with reference to SEQ ID NO:1), mutations that increase serum stability (e.g., M25Y, S27T, and T29E as numbered with reference to SEQ ID NO:1), and at least 85% identity, at least 90% identity, or at least 95% identity to the sequence of SEQ ID NO:130. In some embodiments, clone CH3C.35.23.2 with the hole mutations and the mutations that increase serum stability has the sequence of SEQ ID NO:130.

[0284] In some embodiments, clone CH3C.35.23.2 may have hole mutations (e.g., T1395, L141A, and Y180V as numbered with reference to SEQ ID NO:1), mutations that increase serum stability (e.g., N2075 with or without M201L as numbered with reference to SEQ ID NO:1), and at least 85% identity, at least 90% identity, or at least 95% identity to the sequence of SEQ ID NO:255. In some embodiments, clone CH3C.35.23.2 with the hole mutations and the mutations that increase serum stability has the sequence of SEQ ID NO:255.

[0285] In some embodiments, clone CH3C.35.23.2 may have hole mutations (e.g., T1395, L141A, and Y180V as numbered with reference to SEQ ID NO:1), mutations that modulate effector function (e.g., L7A, L8A, and/or P102G (e.g., L7A and L8A) as numbered with reference to SEQ ID NO:1), mutations that increase serum stability (e.g., M25Y, S27T, and T29E as numbered with reference to SEQ ID NO:1), and at least 85% identity, at least 90% identity, or at least 95% identity to the sequence of SEQ ID NO:131 or 132. In some embodiments, clone CH3C.35.23.2 with the hole mutations, the mutations that modulate effector function, and the mutations that increase serum stability has the sequence of SEQ ID NO:131 or 132.

[0286] In some embodiments, clone CH3C.35.23.2 may have hole mutations (e.g., T1395, L141A, and Y180V as numbered with reference to SEQ ID NO:1), mutations that modulate effector function (e.g., L7A, L8A, and/or P102G (e.g., L7A and L8A) as numbered with reference to SEQ ID NO:1), mutations that increase serum stability (e.g., N2075 with or without M201L as numbered with reference to SEQ ID NO:1), and at least 85% identity, at least 90% identity, or at least 95% identity to the sequence of SEQ ID NO:256 or 257. In some embodiments, clone CH3C.35.23.2 with the hole mutations, the mutations that modulate effector function, and the mutations that increase serum stability has the sequence of SEQ ID NO:256 or 257.

[0287] Clone CH3C.35.23.3

[0288] In some embodiments, clone CH3C.35.23.3 may have a knob mutation (e.g., T139W as numbered with reference to SEQ ID NO:1) and at least 85% identity, at least 90% identity, or at least 95% identity to the sequence of SEQ ID NO:133. In some embodiments, clone CH3C.35.23.3 with the knob mutation has the sequence of SEQ ID NO:133.

[0289] In some embodiments, clone CH3C.35.23.3 may have a knob mutation (e.g., T139W as numbered with reference to SEQ ID NO:1), mutations that modulate effector function (e.g., L7A, L8A, and/or P102G (e.g., L7A and L8A) as numbered with reference to SEQ ID NO:1), and at least 85% identity, at least 90% identity, or at least 95% identity to the sequence of SEQ ID NO:134 or 135. In some embodiments, clone CH3C.35.23.3 with the knob mutation and the mutations that modulate effector function has the sequence of SEQ ID NO:134 or 135.

[0290] In some embodiments, clone CH3C.35.23.3 may have a knob mutation (e.g., T139W as numbered with reference to SEQ ID NO:1), mutations that increase serum stability (e.g., M25Y, S27T, and T29E as numbered with reference to SEQ ID NO:1), and at least 85% identity, at least 90% identity, or at least 95% identity to the sequence of SEQ ID NO:136. In some embodiments, clone CH3C.35.23.3 with the knob mutation and the mutations that increase serum stability has the sequence of SEQ ID NO:136.

[0291] In some embodiments, clone CH3C.35.23.3 may have a knob mutation (e.g., T139W as numbered with reference to SEQ ID NO:1), mutations that increase serum stability (e.g., N207S with or without M201L as numbered with reference to SEQ ID NO:1), and at least 85% identity, at least 90% identity, or at least 95% identity to the sequence of SEQ ID NO:259. In some embodiments, clone CH3C.35.23.3 with the knob mutation and the mutations that increase serum stability has the sequence of SEQ ID NO:259.

[0292] In some embodiments, clone CH3C.35.23.3 may have a knob mutation (e.g., T139W as numbered with reference to SEQ ID NO:1), mutations that modulate effector function (e.g., L7A, L8A, and/or P102G (e.g., L7A and L8A) as numbered with reference to SEQ ID NO:1), mutations that increase serum stability (e.g., M25Y, S27T, and T29E as numbered with reference to SEQ ID NO:1), and at least 85% identity, at least 90% identity, or at least 95% identity to the sequence of SEQ ID NO:137 or 138. In some embodiments, clone CH3C.35.23.3 with the knob mutation, the mutations that modulate effector function, and the mutations that increase serum stability has the sequence of SEQ ID NO:137 or 138.

[0293] In some embodiments, clone CH3C.35.23.3 may have a knob mutation (e.g., T139W as numbered with reference to SEQ ID NO:1), mutations that modulate effector function (e.g., L7A, L8A, and/or P102G (e.g., L7A and L8A) as numbered with reference to SEQ ID NO:1), mutations that increase serum stability (e.g., N2075 with or without M201L as numbered with reference to SEQ ID NO:1), and at least 85% identity, at least 90% identity, or at least 95% identity to the sequence of SEQ ID NO:260 or 261. In some embodiments, clone CH3C.35.23.3 with the knob mutation, the mutations that modulate effector function, and the mutations that increase serum stability has the sequence of SEQ ID NO:260 or 261.

[0294] In some embodiments, clone CH3C.35.23.3 may have hole mutations (e.g., T1395, L141A, and Y180V as numbered with reference to SEQ ID NO:1) and at least 85% identity, at least 90% identity, or at least 95% identity to the sequence of SEQ ID NO:139. In some embodiments, clone CH3C.35.23.3 with the hole mutations and the sequence of SEQ ID NO:139.

[0295] In some embodiments, clone CH3C.35.23.3 may have hole mutations (e.g., T1395, L141A, and Y180V as numbered with reference to SEQ ID NO:1), mutations that modulate effector function (e.g., L7A, L8A, and/or P102G (e.g., L7A and L8A) as numbered with reference to SEQ ID NO:1), and at least 85% identity, at least 90% identity, or at least 95% identity to the sequence of SEQ ID NO:140 or 141. In some embodiments, clone CH3C.35.23.3 with the hole mutations and the mutations that modulate effector function has the sequence of SEQ ID NO:140 or 141.

[0296] In some embodiments, clone CH3C.35.23.3 may have hole mutations (e.g., T139S, L141A, and Y180V as numbered with reference to SEQ ID NO:1), mutations that increase serum stability (e.g., M25Y, S27T, and T29E as numbered with reference to SEQ ID NO:1), and at least 85% identity, at least 90% identity, or at least 95% identity to the sequence of SEQ ID NO:142. In some embodiments, clone CH3C.35.23.3 with the hole mutations and the mutations that increase serum stability has the sequence of SEQ ID NO:142.

[0297] In some embodiments, clone CH3C.35.23.3 may have hole mutations (e.g., T139S, L141A, and Y180V as numbered with reference to SEQ ID NO:1), mutations that increase serum stability (e.g., N2075 with or without M201L as numbered with reference to SEQ ID NO:1), and at least 85% identity, at least 90% identity, or at least 95% identity to the sequence of SEQ ID NO:262. In some embodiments, clone CH3C.35.23.3 with the hole mutations and the mutations that increase serum stability has the sequence of SEQ ID NO:262.

[0298] In some embodiments, clone CH3C.35.23.3 may have hole mutations (e.g., T139S, L141A, and Y180V as numbered with reference to SEQ ID NO:1), mutations that modulate effector function (e.g., L7A, L8A, and/or P102G (e.g., L7A and L8A) as numbered with reference to SEQ ID NO:1), mutations that increase serum stability (e.g., M25Y, S27T, and T29E as numbered with reference to SEQ ID NO:1), and at least 85% identity, at least 90% identity, or at least 95% identity to the sequence of SEQ ID NO:143 or 144. In some embodiments, clone CH3C.35.23.3 with the hole mutations, the mutations that modulate effector function, and the mutations that increase serum stability has the sequence of SEQ ID NO:143 or 144.

[0299] In some embodiments, clone CH3C.35.23.3 may have hole mutations (e.g., T139S, L141A, and Y180V as numbered with reference to SEQ ID NO:1), mutations that modulate effector function (e.g., L7A, L8A, and/or P102G (e.g., L7A and L8A) as numbered with reference to SEQ ID NO:1), mutations that increase serum stability (e.g., N2075 with or without M201L as numbered with reference to SEQ ID NO:1), and at least 85% identity, at least 90% identity, or at least 95% identity to the sequence of SEQ ID NO:263 or 264. In some embodiments, clone CH3C.35.23.3 with the hole mutations, the mutations that modulate effector function, and the mutations that increase serum stability has the sequence of SEQ ID NO:263 or 264.

[0300] Clone CH3C.35.23.4

[0301] In some embodiments, clone CH3C.35.23.4 may have a knob mutation (e.g., T139W as numbered with reference to SEQ ID NO:1) and at least 85% identity, at least 90% identity, or at least 95% identity to the sequence of SEQ ID NO:145. In some embodiments, clone CH3C.35.23.4 with the knob mutation has the sequence of SEQ ID NO:145.

[0302] In some embodiments, clone CH3C.35.23.4 may have a knob mutation (e.g., T139W as numbered with reference to SEQ ID NO:1), mutations that modulate effector function (e.g., L7A, L8A, and/or P102G (e.g., L7A and L8A) as numbered with reference to SEQ ID NO:1), and at least 85% identity, at least 90% identity, or at least 95% identity to the sequence of SEQ ID NO:146 or 147. In some embodiments, clone CH3C.35.23.4 with the knob mutation and the mutations that modulate effector function has the sequence of SEQ ID NO:146 or 147.

[0303] In some embodiments, clone CH3C.35.23.4 may have a knob mutation (e.g., T139W as numbered with reference to SEQ ID NO:1), mutations that increase serum stability (e.g., M25Y, S27T, and T29E as numbered with reference to SEQ ID NO:1), and at least 85% identity, at least 90% identity, or at least 95% identity to the sequence of SEQ ID NO:148. In some embodiments, clone CH3C.35.23.4 with the knob mutation and the mutations that increase serum stability has the sequence of SEQ ID NO:148.

[0304] In some embodiments, clone CH3C.35.23.4 may have a knob mutation (e.g., T139W as numbered with reference to SEQ ID NO:1), mutations that increase serum stability (e.g., N2075 with or without M201L as numbered with reference to SEQ ID NO:1), and at least 85% identity, at least 90% identity, or at least 95% identity to the sequence of SEQ ID NO:266. In some embodiments, clone CH3C.35.23.4 with the knob mutation and the mutations that increase serum stability has the sequence of SEQ ID NO:266.

[0305] In some embodiments, clone CH3C.35.23.4 may have a knob mutation (e.g., T139W as numbered with reference to SEQ ID NO:1), mutations that modulate effector function (e.g., L7A, L8A, and/or P102G (e.g., L7A and L8A) as numbered with reference to SEQ ID NO:1), mutations that increase serum stability (e.g., M25Y, S27T, and T29E as numbered with reference to SEQ ID NO:1), and at least 85% identity, at least 90% identity, or at least 95% identity to the sequence of SEQ ID NO:149 or 150. In some embodiments, clone CH3C.35.23.4 with the knob mutation, the mutations that modulate effector function, and the mutations that increase serum stability has the sequence of SEQ ID NO:149 or 150.

[0306] In some embodiments, clone CH3C.35.23.4 may have a knob mutation (e.g., T139W as numbered with reference to SEQ ID NO:1), mutations that modulate effector function (e.g., L7A, L8A, and/or P102G (e.g., L7A and L8A) as numbered with reference to SEQ ID NO:1), mutations that increase serum stability (e.g., N2075 with or without M201L as numbered with reference to SEQ ID NO:1), and at least 85% identity, at least 90% identity, or at least 95% identity to the sequence of SEQ ID NO:267 or 268. In some embodiments, clone CH3C.35.23.4 with the knob mutation, the mutations that modulate effector function, and the mutations that increase serum stability has the sequence of SEQ ID NO:267 or 268.

[0307] In some embodiments, clone CH3C.35.23.4 may have hole mutations (e.g., T1395, L141A, and Y180V as numbered with reference to SEQ ID NO:1) and at least 85% identity, at least 90% identity, or at least 95% identity to the sequence of SEQ ID NO:151. In some embodiments, clone CH3C.35.23.4 with the hole mutations has the sequence of SEQ ID NO:151.

[0308] In some embodiments, clone CH3C.35.23.4 may have hole mutations (e.g., T1395, L141A, and Y180V as numbered with reference to SEQ ID NO:1), mutations that modulate effector function (e.g., L7A, L8A, and/or P102G (e.g., L7A and L8A) as numbered with reference to SEQ ID NO:1), and at least 85% identity, at least 90% identity, or at least 95% identity to the sequence of SEQ ID NO:152 or 153. In some embodiments, clone CH3C.35.23.4 with the hole mutations and the mutations that modulate effector function has the sequence of SEQ ID NO:152 or 153.

[0309] In some embodiments, clone CH3C.35.23.4 may have hole mutations (e.g., T1395, L141A, and Y180V as numbered with reference to SEQ ID NO:1), mutations that increase serum stability (e.g., M25Y, S27T, and T29E as numbered with reference to SEQ ID NO:1), and at least 85% identity, at least 90% identity, or at least 95% identity to the sequence of SEQ ID NO:154. In some embodiments, clone CH3C.35.23.4 with the hole mutations and the mutations that increase serum stability has the sequence of SEQ ID NO:154.

[0310] In some embodiments, clone CH3C.35.23.4 may have hole mutations (e.g., T1395, L141A, and Y180V as numbered with reference to SEQ ID NO:1), mutations that increase serum stability (e.g., N207S with or without M201L as numbered with reference to SEQ ID NO:1), and at least 85% identity, at least 90% identity, or at least 95% identity to the sequence of SEQ ID NO:269. In some embodiments, clone CH3C.35.23.4 with the hole mutations and the mutations that increase serum stability has the sequence of SEQ ID NO:269.

[0311] In some embodiments, clone CH3C.35.23.4 may have hole mutations (e.g., T1395, L141A, and Y180V as numbered with reference to SEQ ID NO:1), mutations that modulate effector function (e.g., L7A, L8A, and/or P102G (e.g., L7A and L8A) as numbered with reference to SEQ ID NO:1), mutations that increase serum stability (e.g., M25Y, S27T, and T29E as numbered with reference to SEQ ID NO:1), and at least 85% identity, at least 90% identity, or at least 95% identity to the sequence of SEQ ID NO:155 or 156. In some embodiments, clone CH3C.35.23.4 with the hole mutations, the mutations that modulate effector function, and the mutations that increase serum stability has the sequence of SEQ ID NO:155 or 156.

[0312] In some embodiments, clone CH3C.35.23.4 may have hole mutations (e.g., T1395, L141A, and Y180V as numbered with reference to SEQ ID NO:1), mutations that modulate effector function (e.g., L7A, L8A, and/or P102G (e.g., L7A and L8A) as numbered with reference to SEQ ID NO:1), mutations that increase serum stability (e.g., N2075 with or without M201L as numbered with reference to SEQ ID NO:1), and at least 85% identity, at least 90% identity, or at least 95% identity to the sequence of SEQ ID NO:270 or 271. In some embodiments, clone CH3C.35.23.4 with the hole mutations, the mutations that modulate effector function, and the mutations that increase serum stability has the sequence of SEQ ID NO:270 or 271.

[0313] Clone CH3C.35.21.17.2

[0314] In some embodiments, clone CH3C.35.21.17.2 may have a knob mutation (e.g., T139W as numbered with reference to SEQ ID NO:1) and at least 85% identity, at least 90% identity, or at least 95% identity to the sequence of SEQ ID NO:157. In some embodiments, clone CH3C.35.21.17.2 with the knob mutation has the sequence of SEQ ID NO:157.

[0315] In some embodiments, clone CH3C.35.21.17.2 may have a knob mutation (e.g., T139W as numbered with reference to SEQ ID NO:1), mutations that modulate effector function (e.g., L7A, L8A, and/or P102G (e.g., L7A and L8A) as numbered with reference to SEQ ID NO:1), and at least 85% identity, at least 90% identity, or at least 95% identity to the sequence of SEQ ID NO:158 or 159. In some embodiments, clone CH3C.35.21.17.2 with the knob mutation and the mutations that modulate effector function has the sequence of SEQ ID NO:158 or 159.

[0316] In some embodiments, clone CH3C.35.21.17.2 may have a knob mutation (e.g., T139W as numbered with reference to SEQ ID NO:1), mutations that increase serum stability (e.g., M25Y, S27T, and T29E as numbered with reference to SEQ ID NO:1), and at least 85% identity, at least 90% identity, or at least 95% identity to the sequence of SEQ ID NO:160. In some embodiments, clone CH3C.35.21.17.2 with the knob mutation and the mutations that increase serum stability has the sequence of SEQ ID NO:160.

[0317] In some embodiments, clone CH3C.35.21.17.2 may have a knob mutation (e.g., T139W as numbered with reference to SEQ ID NO:1), mutations that increase serum stability (e.g., N2075 with or without M201L as numbered with reference to SEQ ID NO:1), and at least 85% identity, at least 90% identity, or at least 95% identity to the sequence of SEQ ID NO:273. In some embodiments, clone CH3C.35.21.17.2 with the knob mutation and the mutations that increase serum stability has the sequence of SEQ ID NO:273.

[0318] In some embodiments, clone CH3C.35.21.17.2 may have a knob mutation (e.g., T139W as numbered with reference to SEQ ID NO:1), mutations that modulate effector function (e.g., L7A, L8A, and/or P102G (e.g., L7A and L8A) as numbered with reference to SEQ ID NO:1), mutations that increase serum stability (e.g., M25Y, S27T, and T29E as numbered with reference to SEQ ID NO:1), and at least 85% identity, at least 90% identity, or at least 95% identity to the sequence of SEQ ID NO:161 or 162. In some embodiments, clone CH3C.35.21.17.2 with the knob mutation, the mutations that modulate effector function, and the mutations that increase serum stability has the sequence of SEQ ID NO:161 or 162.

[0319] In some embodiments, clone CH3C.35.21.17.2 may have a knob mutation (e.g., T139W as numbered with reference to SEQ ID NO:1), mutations that modulate effector function (e.g., L7A, L8A, and/or P102G (e.g., L7A and L8A) as numbered with reference to SEQ ID NO:1), mutations that increase serum stability (e.g., N2075 with or without M201L as numbered with reference to SEQ ID NO:1), and at least 85% identity, at least 90% identity, or at least 95% identity to the sequence of SEQ ID NO:274 or 275. In some embodiments, clone CH3C.35.21.17.2 with the knob mutation, the mutations that modulate effector function, and the mutations that increase serum stability has the sequence of SEQ ID NO:274 or 275.

[0320] In some embodiments, clone CH3C.35.21.17.2 may have hole mutations (e.g., T139S, L141A, and Y180V as numbered with reference to SEQ ID NO:1) and at least 85% identity, at least 90% identity, or at least 95% identity to the sequence of SEQ ID NO:163. In some embodiments, clone CH3C.35.21.17.2 with the hole mutations has the sequence of SEQ ID NO:163.

[0321] In some embodiments, clone CH3C.35.21.17.2 may have hole mutations (e.g., T139S, L141A, and Y180V as numbered with reference to SEQ ID NO:1), mutations that modulate effector function (e.g., L7A, L8A, and/or P102G (e.g., L7A and L8A) as numbered with reference to SEQ ID NO:1), and at least 85% identity, at least 90% identity, or at least 95% identity to the sequence of SEQ ID NO:164 or 165. In some embodiments, clone CH3C.35.21.17.2 with the hole mutations and the mutations that modulate effector function has the sequence of SEQ ID NO:164 or 165.

[0322] In some embodiments, clone CH3C.35.21.17.2 may have hole mutations (e.g., T139S, L141A, and Y180V as numbered with reference to SEQ ID NO:1), mutations that increase serum stability (e.g., M25Y, S27T, and T29E as numbered with reference to SEQ ID NO:1), and at least 85% identity, at least 90% identity, or at least 95% identity to the sequence of SEQ ID NO:166. In some embodiments, clone CH3C.35.21.17.2 with the hole mutations and the mutations that increase serum stability has the sequence of SEQ ID NO:166.

[0323] In some embodiments, clone CH3C.35.21.17.2 may have hole mutations (e.g., T139S, L141A, and Y180V as numbered with reference to SEQ ID NO:1), mutations that increase serum stability (e.g., N2075 with or without M201L as numbered with reference to SEQ ID NO:1), and at least 85% identity, at least 90% identity, or at least 95% identity to the sequence of SEQ ID NO:276. In some embodiments, clone CH3C.35.21.17.2 with the hole mutations and the mutations that increase serum stability has the sequence of SEQ ID NO:276.

[0324] In some embodiments, clone CH3C.35.21.17.2 may have hole mutations (e.g., T139S, L141A, and Y180V as numbered with reference to SEQ ID NO:1), mutations that modulate effector function (e.g., L7A, L8A, and/or P102G (e.g., L7A and L8A) as numbered with reference to SEQ ID NO:1), mutations that increase serum stability (e.g., M25Y, S27T, and T29E as numbered with reference to SEQ ID NO:1), and at least 85% identity, at least 90% identity, or at least 95% identity to the sequence of SEQ ID NO:167 or 168. In some embodiments, clone CH3C.35.21.17.2 with the hole mutations, the mutations that modulate effector function, and the mutations that increase serum stability has the sequence of SEQ ID NO:167 or 168.

[0325] In some embodiments, clone CH3C.35.21.17.2 may have hole mutations (e.g., T1395, L141A, and Y180V as numbered with reference to SEQ ID NO:1), mutations that modulate effector function (e.g., L7A, L8A, and/or P102G (e.g., L7A and L8A) as numbered with reference to SEQ ID NO:1), mutations that increase serum stability (e.g., N2075 with or without M201L as numbered with reference to SEQ ID NO:1), and at least 85% identity, at least 90% identity, or at least 95% identity to the sequence of SEQ ID NO:277 or 278. In some embodiments, clone CH3C.35.21.17.2 with the hole mutations, the mutations that modulate effector function, and the mutations that increase serum stability has the sequence of SEQ ID NO:277 or 278.

[0326] Clone CH3C.35.23

[0327] In some embodiments, clone CH3C.35.23 may have a knob mutation (e.g., T139W as numbered with reference to SEQ ID NO:1) and at least 85% identity, at least 90% identity, or at least 95% identity to the sequence of SEQ ID NO:169. In some embodiments, clone CH3C.35.23 with the knob mutation has the sequence of SEQ ID NO:169.

[0328] In some embodiments, clone CH3C.35.23 may have a knob mutation (e.g., T139W as numbered with reference to SEQ ID NO:1), mutations that modulate effector function (e.g., L7A, L8A, and/or P102G (e.g., L7A and L8A) as numbered with reference to SEQ ID NO:1), and at least 85% identity, at least 90% identity, or at least 95% identity to the sequence of SEQ ID NO:170 or 171. In some embodiments, clone CH3C.35.23 with the knob mutation and the mutations that modulate effector function has the sequence of SEQ ID NO:170 or 171.

[0329] In some embodiments, clone CH3C.35.23 may have a knob mutation (e.g., T139W as numbered with reference to SEQ ID NO:1), mutations that increase serum stability (e.g., M25Y, S27T, and T29E as numbered with reference to SEQ ID NO:1), and at least 85% identity, at least 90% identity, or at least 95% identity to the sequence of SEQ ID NO:172. In some embodiments, clone CH3C.35.23 with the knob mutation and the mutations that increase serum stability has the sequence of SEQ ID NO:172.

[0330] In some embodiments, clone CH3C.35.23 may have a knob mutation (e.g., T139W as numbered with reference to SEQ ID NO:1), mutations that increase serum stability (e.g., N2075 with or without M201L as numbered with reference to SEQ ID NO:1), and at least 85% identity, at least 90% identity, or at least 95% identity to the sequence of SEQ ID NO:280. In some embodiments, clone CH3C.35.23 with the knob mutation and the mutations that increase serum stability has the sequence of SEQ ID NO:280.

[0331] In some embodiments, clone CH3C.35.23 may have a knob mutation (e.g., T139W as numbered with reference to SEQ ID NO:1), mutations that modulate effector function (e.g., L7A, L8A, and/or P102G (e.g., L7A and L8A) as numbered with reference to SEQ ID NO:1), mutations that increase serum stability (e.g., M25Y, S27T, and T29E as numbered with reference to SEQ ID NO:1), and at least 85% identity, at least 90% identity, or at least 95% identity to the sequence of SEQ ID NO:173 or 174. In some embodiments, clone CH3C.35.23 with the knob mutation, the mutations that modulate effector function, and the mutations that increase serum stability has the sequence of SEQ ID NO:173 or 174.

[0332] In some embodiments, clone CH3C.35.23 may have a knob mutation (e.g., T139W as numbered with reference to SEQ ID NO:1), mutations that modulate effector function (e.g., L7A, L8A, and/or P102G (e.g., L7A and L8A) as numbered with reference to SEQ ID NO:1), mutations that increase serum stability (e.g., N2075 with or without M201L as numbered with reference to SEQ ID NO:1), and at least 85% identity, at least 90% identity, or at least 95% identity to the sequence of SEQ ID NO:281 or 282. In some embodiments, clone CH3C.35.23 with the knob mutation, the mutations that modulate effector function, and the mutations that increase serum stability has the sequence of SEQ ID NO:281 or 282.

[0333] In some embodiments, clone CH3C.35.23 may have hole mutations (e.g., T1395, L141A, and Y180V as numbered with reference to SEQ ID NO:1) and at least 85% identity, at least 90% identity, or at least 95% identity to the sequence of SEQ ID NO:175. In some embodiments, clone CH3C.35.23 with the hole mutations has the sequence of SEQ ID NO:175.

[0334] In some embodiments, clone CH3C.35.23 may have hole mutations (e.g., T1395, L141A, and Y180V as numbered with reference to SEQ ID NO:1), mutations that modulate effector function (e.g., L7A, L8A, and/or P102G (e.g., L7A and L8A) as numbered with reference to SEQ ID NO:1), and at least 85% identity, at least 90% identity, or at least 95% identity to the sequence of SEQ ID NO:176 or 177. In some embodiments, clone CH3C.35.23 with the hole mutations and the mutations that modulate effector function has the sequence of SEQ ID NO:176 or 177.

[0335] In some embodiments, clone CH3C.35.23 may have hole mutations (e.g., T139S, L141A, and Y180V as numbered with reference to SEQ ID NO:1), mutations that increase serum stability (e.g., M25Y, S27T, and T29E as numbered with reference to SEQ ID NO:1), and at least 85% identity, at least 90% identity, or at least 95% identity to the sequence of SEQ ID NO:178. In some embodiments, clone CH3C.35.23 with the hole mutations and the mutations that increase serum stability has the sequence of SEQ ID NO:178.

[0336] In some embodiments, clone CH3C.35.23 may have hole mutations (e.g., T139S, L141A, and Y180V as numbered with reference to SEQ ID NO:1), mutations that increase serum stability (e.g., N2075 with or without M201L as numbered with reference to SEQ ID NO:1), and at least 85% identity, at least 90% identity, or at least 95% identity to the sequence of SEQ ID NO:283. In some embodiments, clone CH3C.35.23 with the hole mutations and the mutations that increase serum stability has the sequence of SEQ ID NO:283.

[0337] In some embodiments, clone CH3C.35.23 may have hole mutations (e.g., T139S, L141A, and Y180V as numbered with reference to SEQ ID NO:1), mutations that modulate effector function (e.g., L7A, L8A, and/or P102G (e.g., L7A and L8A) as numbered with reference to SEQ ID NO:1), mutations that increase serum stability (e.g., M25Y, S27T, and T29E as numbered with reference to SEQ ID NO:1), and at least 85% identity, at least 90% identity, or at least 95% identity to the sequence of SEQ ID NO:179 or 180. In some embodiments, clone CH3C.35.23 with the hole mutations, the mutations that modulate effector function, and the mutations that increase serum stability has the sequence of SEQ ID NO:179 or 180.

[0338] In some embodiments, clone CH3C.35.23 may have hole mutations (e.g., T139S, L141A, and Y180V as numbered with reference to SEQ ID NO:1), mutations that modulate effector function (e.g., L7A, L8A, and/or P102G (e.g., L7A and L8A) as numbered with reference to SEQ ID NO:1), mutations that increase serum stability (e.g., N2075 with or without M201L as numbered with reference to SEQ ID NO:1), and at least 85% identity, at least 90% identity, or at least 95% identity to the sequence of SEQ ID NO:284 or 285. In some embodiments, clone CH3C.35.23 with the hole mutations, the mutations that modulate effector function, and the mutations that increase serum stability has the sequence of SEQ ID NO:284 or 285.

[0339] Clone CH3C.35.21

[0340] In some embodiments, clone CH3C.35.21 may have a knob mutation (e.g., T139W as numbered with reference to SEQ ID NO:1) and at least 85% identity, at least 90% identity, or at least 95% identity to the sequence of SEQ ID NO:196. In some embodiments, clone CH3C.35.21 with the knob mutation has the sequence of SEQ ID NO:196.

[0341] In some embodiments, clone CH3C.35.21 may have a knob mutation (e.g., T139W as numbered with reference to SEQ ID NO:1), mutations that modulate effector function (e.g., L7A, L8A, and/or P102G (e.g., L7A and L8A) as numbered with reference to SEQ ID NO:1), and at least 85% identity, at least 90% identity, or at least 95% identity to the sequence of SEQ ID NO:197 or 198. In some embodiments, clone CH3C.35.21 with the knob mutation and the mutations that modulate effector function has the sequence of SEQ ID NO:197 or 198.

[0342] In some embodiments, clone CH3C.35.21 may have a knob mutation (e.g., T139W as numbered with reference to SEQ ID NO:1), mutations that increase serum stability (e.g., M25Y, S27T, and T29E as numbered with reference to SEQ ID NO:1), and at least 85% identity, at least 90% identity, or at least 95% identity to the sequence of SEQ ID NO:199. In some embodiments, clone CH3C.35.21 with the knob mutation and the mutations that increase serum stability has the sequence of SEQ ID NO:199.

[0343] In some embodiments, clone CH3C.35.21 may have a knob mutation (e.g., T139W as numbered with reference to SEQ ID NO:1), mutations that increase serum stability (e.g., N2075 with or without M201L as numbered with reference to SEQ ID NO:1), and at least 85% identity, at least 90% identity, or at least 95% identity to the sequence of SEQ ID NO:287. In some embodiments, clone CH3C.35.21 with the knob mutation and the mutations that increase serum stability has the sequence of SEQ ID NO:287.

[0344] In some embodiments, clone CH3C.35.21 may have a knob mutation (e.g., T139W as numbered with reference to SEQ ID NO:1), mutations that modulate effector function (e.g., L7A, L8A, and/or P102G (e.g., L7A and L8A) as numbered with reference to SEQ ID NO:1), mutations that increase serum stability (e.g., M25Y, S27T, and T29E as numbered with reference to SEQ ID NO:1), and at least 85% identity, at least 90% identity, or at least 95% identity to the sequence of SEQ ID NO:200 or 201. In some embodiments, clone CH3C.35.21 with the knob mutation, the mutations that modulate effector function, and the mutations that increase serum stability has the sequence of SEQ ID NO:200 or 201.

[0345] In some embodiments, clone CH3C.35.21 may have a knob mutation (e.g., T139W as numbered with reference to SEQ ID NO:1), mutations that modulate effector function (e.g., L7A, L8A, and/or P102G (e.g., L7A and L8A) as numbered with reference to SEQ ID NO:1), mutations that increase serum stability (e.g., N2075 with or without M201L as numbered with reference to SEQ ID NO:1), and at least 85% identity, at least 90% identity, or at least 95% identity to the sequence of SEQ ID NO:288 or 289. In some embodiments, clone CH3C.35.21 with the knob mutation, the mutations that modulate effector function, and the mutations that increase serum stability has the sequence of SEQ ID NO:288 or 289.

[0346] In some embodiments, clone CH3C.35.21 may have hole mutations (e.g., T139S, L141A, and Y180V as numbered with reference to SEQ ID NO:1) and at least 85% identity, at least 90% identity, or at least 95% identity to the sequence of SEQ ID NO:202. In some embodiments, clone CH3C.35.21 with the hole mutations has the sequence of SEQ ID NO:202.

[0347] In some embodiments, clone CH3C.35.21 may have hole mutations (e.g., T139S, L141A, and Y180V as numbered with reference to SEQ ID NO:1), mutations that modulate effector function (e.g., L7A, L8A, and/or P102G (e.g., L7A and L8A) as numbered with reference to SEQ ID NO:1), and at least 85% identity, at least 90% identity, or at least 95% identity to the sequence of SEQ ID NO:203 or 204. In some embodiments, clone CH3C.35.21 with the hole mutations and the mutations that modulate effector function has the sequence of SEQ ID NO:203 or 204.

[0348] In some embodiments, clone CH3C.35.21 may have hole mutations (e.g., T139S, L141A, and Y180V as numbered with reference to SEQ ID NO:1), mutations that increase serum stability (e.g., M25Y, S27T, and T29E as numbered with reference to SEQ ID NO:1), and at least 85% identity, at least 90% identity, or at least 95% identity to the sequence of SEQ ID NO:205. In some embodiments, clone CH3C.35.21 with the hole mutations and the mutations that increase serum stability has the sequence of SEQ ID NO:205.

[0349] In some embodiments, clone CH3C.35.21 may have hole mutations (e.g., T139S, L141A, and Y180V as numbered with reference to SEQ ID NO:1), mutations that increase serum stability (e.g., N2075 with or without M201L as numbered with reference to SEQ ID NO:1), and at least 85% identity, at least 90% identity, or at least 95% identity to the sequence of SEQ ID NO:290. In some embodiments, clone CH3C.35.21 with the hole mutations and the mutations that increase serum stability has the sequence of SEQ ID NO:290.

[0350] In some embodiments, clone CH3C.35.21 may have hole mutations (e.g., T1395, L141A, and Y180V as numbered with reference to SEQ ID NO:1), mutations that modulate effector function (e.g., L7A, L8A, and/or P102G (e.g., L7A and L8A) as numbered with reference to SEQ ID NO:1), mutations that increase serum stability (e.g., M25Y, S27T, and T29E as numbered with reference to SEQ ID NO:1), and at least 85% identity, at least 90% identity, or at least 95% identity to the sequence of SEQ ID NO:206 or 207. In some embodiments, clone CH3C.35.21 with the hole mutations, the mutations that modulate effector function, and the mutations that increase serum stability has the sequence of SEQ ID NO:206 or 207.

[0351] In some embodiments, clone CH3C.35.21 may have hole mutations (e.g., T1395, L141A, and Y180V as numbered with reference to SEQ ID NO:1), mutations that modulate effector function (e.g., L7A, L8A, and/or P102G (e.g., L7A and L8A) as numbered with reference to SEQ ID NO:1), mutations that increase serum stability (e.g., N2075 with or without M201L as numbered with reference to SEQ ID NO:1), and at least 85% identity, at least 90% identity, or at least 95% identity to the sequence of SEQ ID NO:291 or 292. In some embodiments, clone CH3C.35.21 with the hole mutations, the mutations that modulate effector function, and the mutations that increase serum stability has the sequence of SEQ ID NO:291 or 292.

[0352] Clone CH3C.35.20.1.1

[0353] In some embodiments, clone CH3C.35.20.1.1 may have a knob mutation (e.g., T139W as numbered with reference to SEQ ID NO:1) and at least 85% identity, at least 90% identity, or at least 95% identity to the sequence of SEQ ID NO:208. In some embodiments, clone CH3C.35.20.1.1 with the knob mutation has the sequence of SEQ ID NO:208.

[0354] In some embodiments, clone CH3C.35.20.1.1 may have a knob mutation (e.g., T139W as numbered with reference to SEQ ID NO:1), mutations that modulate effector function (e.g., L7A, L8A, and/or P102G (e.g., L7A and L8A) as numbered with reference to SEQ ID NO:1), and at least 85% identity, at least 90% identity, or at least 95% identity to the sequence of SEQ ID NO:209 or 210. In some embodiments, clone CH3C.35.20.1.1 with the knob mutation and the mutations that modulate effector function has the sequence of SEQ ID NO:209 or 210.

[0355] In some embodiments, clone CH3C.35.20.1.1 may have a knob mutation (e.g., T139W as numbered with reference to SEQ ID NO:1), mutations that increase serum stability (e.g., M25Y, S27T, and T29E as numbered with reference to SEQ ID NO:1), and at least 85% identity, at least 90% identity, or at least 95% identity to the sequence of SEQ ID NO:211. In some embodiments, clone CH3C.35.20.1.1 with the knob mutation and the mutations that increase serum stability has the sequence of SEQ ID NO:211.

[0356] In some embodiments, clone CH3C.35.20.1.1 may have a knob mutation (e.g., T139W as numbered with reference to SEQ ID NO:1), mutations that increase serum stability (e.g., N2075 with or without M201L as numbered with reference to SEQ ID NO:1), and at least 85% identity, at least 90% identity, or at least 95% identity to the sequence of SEQ ID NO:294. In some embodiments, clone CH3C.35.20.1.1 with the knob mutation and the mutations that increase serum stability has the sequence of SEQ ID NO:294.

[0357] In some embodiments, clone CH3C.35.20.1.1 may have a knob mutation (e.g., T139W as numbered with reference to SEQ ID NO:1), mutations that modulate effector function (e.g., L7A, L8A, and/or P102G (e.g., L7A and L8A) as numbered with reference to SEQ ID NO:1), mutations that increase serum stability (e.g., M25Y, S27T, and T29E as numbered with reference to SEQ ID NO:1), and at least 85% identity, at least 90% identity, or at least 95% identity to the sequence of SEQ ID NO:212 or 213. In some embodiments, clone CH3C.35.20.1.1 with the knob mutation, the mutations that modulate effector function, and the mutations that increase serum stability has the sequence of SEQ ID NO:212 or 213.

[0358] In some embodiments, clone CH3C.35.20.1.1 may have a knob mutation (e.g., T139W as numbered with reference to SEQ ID NO:1), mutations that modulate effector function (e.g., L7A, L8A, and/or P102G (e.g., L7A and L8A) as numbered with reference to SEQ ID NO:1), mutations that increase serum stability (e.g., N2075 with or without M201L as numbered with reference to SEQ ID NO:1), and at least 85% identity, at least 90% identity, or at least 95% identity to the sequence of SEQ ID NO:295 or 296. In some embodiments, clone CH3C.35.20.1.1 with the knob mutation, the mutations that modulate effector function, and the mutations that increase serum stability has the sequence of SEQ ID NO:295 or 296.

[0359] In some embodiments, clone CH3C.35.20.1.1 may have hole mutations (e.g., T139S, L141A, and Y180V as numbered with reference to SEQ ID NO:1) and at least 85% identity, at least 90% identity, or at least 95% identity to the sequence of SEQ ID NO:214. In some embodiments, clone CH3C.35.20.1.1 with the hole mutations has the sequence of SEQ ID NO:214.

[0360] In some embodiments, clone CH3C.35.20.1.1 may have hole mutations (e.g., T139S, L141A, and Y180V as numbered with reference to SEQ ID NO:1), mutations that modulate effector function (e.g., L7A, L8A, and/or P102G (e.g., L7A and L8A) as numbered with reference to SEQ ID NO:1), and at least 85% identity, at least 90% identity, or at least 95% identity to the sequence of SEQ ID NO:215 or 216. In some embodiments, clone CH3C.35.20.1.1 with the hole mutations and the mutations that modulate effector function has the sequence of SEQ ID NO:215 or 216.

[0361] In some embodiments, clone CH3C.35.20.1.1 may have hole mutations (e.g., T139S, L141A, and Y180V as numbered with reference to SEQ ID NO:1), mutations that increase serum stability (e.g., M25Y, S27T, and T29E as numbered with reference to SEQ ID NO:1), and at least 85% identity, at least 90% identity, or at least 95% identity to the sequence of SEQ ID NO:217. In some embodiments, clone CH3C.35.20.1.1 with the hole mutations and the mutations that increase serum stability has the sequence of SEQ ID NO:217.

[0362] In some embodiments, clone CH3C.35.20.1.1 may have hole mutations (e.g., T139S, L141A, and Y180V as numbered with reference to SEQ ID NO:1), mutations that increase serum stability (e.g., N2075 with or without M201L as numbered with reference to SEQ ID NO:1), and at least 85% identity, at least 90% identity, or at least 95% identity to the sequence of SEQ ID NO:297. In some embodiments, clone CH3C.35.20.1.1 with the hole mutations and the mutations that increase serum stability has the sequence of SEQ ID NO:297.

[0363] In some embodiments, clone CH3C.35.20.1.1 may have hole mutations (e.g., T139S, L141A, and Y180V as numbered with reference to SEQ ID NO:1), mutations that modulate effector function (e.g., L7A, L8A, and/or P102G (e.g., L7A and L8A) as numbered with reference to SEQ ID NO:1), mutations that increase serum stability (e.g., M25Y, S27T, and T29E as numbered with reference to SEQ ID NO:1), and at least 85% identity, at least 90% identity, or at least 95% identity to the sequence of SEQ ID NO:218 or 219. In some embodiments, clone CH3C.35.20.1.1 with the hole mutations, the mutations that modulate effector function, and the mutations that increase serum stability has the sequence of SEQ ID NO:218 or 219.

[0364] In some embodiments, clone CH3C.35.20.1.1 may have hole mutations (e.g., T1395, L141A, and Y180V as numbered with reference to SEQ ID NO:1), mutations that modulate effector function (e.g., L7A, L8A, and/or P102G (e.g., L7A and L8A) as numbered with reference to SEQ ID NO:1), mutations that increase serum stability (e.g., N2075 with or without M201L as numbered with reference to SEQ ID NO:1), and at least 85% identity, at least 90% identity, or at least 95% identity to the sequence of SEQ ID NO:298 or 299. In some embodiments, clone CH3C.35.20.1.1 with the hole mutations, the mutations that modulate effector function, and the mutations that increase serum stability has the sequence of SEQ ID NO:298 or 299.

[0365] Clone CH3C.35.23.2.1

[0366] In some embodiments, clone CH3C.35.23.2.1 may have a knob mutation (e.g., T139W as numbered with reference to SEQ ID NO:1) and at least 85% identity, at least 90% identity, or at least 95% identity to the sequence of SEQ ID NO:220. In some embodiments, clone CH3C.35.23.2.1 with the knob mutation has the sequence of SEQ ID NO:220.

[0367] In some embodiments, clone CH3C.35.23.2.1 may have a knob mutation (e.g., T139W as numbered with reference to SEQ ID NO:1), mutations that modulate effector function (e.g., L7A, L8A, and/or P102G (e.g., L7A and L8A) as numbered with reference to SEQ ID NO:1), and at least 85% identity, at least 90% identity, or at least 95% identity to the sequence of SEQ ID NO:221 or 222. In some embodiments, clone CH3C.35.23.2.1 with the knob mutation and the mutations that modulate effector function has the sequence of SEQ ID NO:221 or 222.

[0368] In some embodiments, clone CH3C.35.23.2.1 may have a knob mutation (e.g., T139W as numbered with reference to SEQ ID NO:1), mutations that increase serum stability (e.g., M25Y, S27T, and T29E as numbered with reference to SEQ ID NO:1), and at least 85% identity, at least 90% identity, or at least 95% identity to the sequence of SEQ ID NO:223. In some embodiments, clone CH3C.35.23.2.1 with the knob mutation and the mutations that increase serum stability has the sequence of SEQ ID NO:223.

[0369] In some embodiments, clone CH3C.35.23.2.1 may have a knob mutation (e.g., T139W as numbered with reference to SEQ ID NO:1), mutations that increase serum stability (e.g., N2075 with or without M201L as numbered with reference to SEQ ID NO:1), and at least 85% identity, at least 90% identity, or at least 95% identity to the sequence of SEQ ID NO:301. In some embodiments, clone CH3C.35.23.2.1 with the knob mutation and the mutations that increase serum stability has the sequence of SEQ ID NO:301.

[0370] In some embodiments, clone CH3C.35.23.2.1 may have a knob mutation (e.g., T139W as numbered with reference to SEQ ID NO:1), mutations that modulate effector function (e.g., L7A, L8A, and/or P102G (e.g., L7A and L8A) as numbered with reference to SEQ ID NO:1), mutations that increase serum stability (e.g., M25Y, S27T, and T29E as numbered with reference to SEQ ID NO:1), and at least 85% identity, at least 90% identity, or at least 95% identity to the sequence of SEQ ID NO:224 or 225. In some embodiments, clone CH3C.35.23.2.1 with the knob mutation, the mutations that modulate effector function, and the mutations that increase serum stability has the sequence of SEQ ID NO:224 or 225.

[0371] In some embodiments, clone CH3C.35.23.2.1 may have a knob mutation (e.g., T139W as numbered with reference to SEQ ID NO:1), mutations that modulate effector function (e.g., L7A, L8A, and/or P102G (e.g., L7A and L8A) as numbered with reference to SEQ ID NO:1), mutations that increase serum stability (e.g., N2075 with or without M201L as numbered with reference to SEQ ID NO:1), and at least 85% identity, at least 90% identity, or at least 95% identity to the sequence of SEQ ID NO:302 or 303. In some embodiments, clone CH3C.35.23.2.1 with the knob mutation, the mutations that modulate effector function, and the mutations that increase serum stability has the sequence of SEQ ID NO:302 or 303.

[0372] In some embodiments, clone CH3C.35.23.2.1 may have hole mutations (e.g., T1395, L141A, and Y180V as numbered with reference to SEQ ID NO:1) and at least 85% identity, at least 90% identity, or at least 95% identity to the sequence of SEQ ID NO:226. In some embodiments, clone CH3C.35.23.2.1 with the hole mutations has the sequence of SEQ ID NO:226.

[0373] In some embodiments, clone CH3C.35.23.2.1 may have hole mutations (e.g., T1395, L141A, and Y180V as numbered with reference to SEQ ID NO:1), mutations that modulate effector function (e.g., L7A, L8A, and/or P102G (e.g., L7A and L8A) as numbered with reference to SEQ ID NO:1), and at least 85% identity, at least 90% identity, or at least 95% identity to the sequence of SEQ ID NO:227 or 228. In some embodiments, clone CH3C.35.23.2.1 with the hole mutations and the mutations that modulate effector function has the sequence of SEQ ID NO:227 or 228.

[0374] In some embodiments, clone CH3C.35.23.2.1 may have hole mutations (e.g., T139S, L141A, and Y180V as numbered with reference to SEQ ID NO:1), mutations that increase serum stability (e.g., M25Y, S27T, and T29E as numbered with reference to SEQ ID NO:1), and at least 85% identity, at least 90% identity, or at least 95% identity to the sequence of SEQ ID NO:229. In some embodiments, clone CH3C.35.23.2.1 with the hole mutations and the mutations that increase serum stability has the sequence of SEQ ID NO:229.

[0375] In some embodiments, clone CH3C.35.23.2.1 may have hole mutations (e.g., T139S, L141A, and Y180V as numbered with reference to SEQ ID NO:1), mutations that increase serum stability (e.g., N2075 with or without M201L as numbered with reference to SEQ ID NO:1), and at least 85% identity, at least 90% identity, or at least 95% identity to the sequence of SEQ ID NO:304. In some embodiments, clone CH3C.35.23.2.1 with the hole mutations and the mutations that increase serum stability has the sequence of SEQ ID NO:304.

[0376] In some embodiments, clone CH3C.35.23.2.1 may have hole mutations (e.g., T139S, L141A, and Y180V as numbered with reference to SEQ ID NO:1), mutations that modulate effector function (e.g., L7A, L8A, and/or P102G (e.g., L7A and L8A) as numbered with reference to SEQ ID NO:1), mutations that increase serum stability (e.g., M25Y, S27T, and T29E as numbered with reference to SEQ ID NO:1), and at least 85% identity, at least 90% identity, or at least 95% identity to the sequence of SEQ ID NO:230 or 231. In some embodiments, clone CH3C.35.23.2.1 with the hole mutations, the mutations that modulate effector function, and the mutations that increase serum stability has the sequence of SEQ ID NO:230 or 231.

[0377] In some embodiments, clone CH3C.35.23.2.1 may have hole mutations (e.g., T139S, L141A, and Y180V as numbered with reference to SEQ ID NO:1), mutations that modulate effector function (e.g., L7A, L8A, and/or P102G (e.g., L7A and L8A) as numbered with reference to SEQ ID NO:1), mutations that increase serum stability (e.g., N2075 with or without M201L as numbered with reference to SEQ ID NO:1), and at least 85% identity, at least 90% identity, or at least 95% identity to the sequence of SEQ ID NO:305 or 306. In some embodiments, clone CH3C.35.23.2.1 with the hole mutations, the mutations that modulate effector function, and the mutations that increase serum stability has the sequence of SEQ ID NO:305 or 306.

[0378] Clone CH3C.35.23.1.1

[0379] In some embodiments, clone CH3C.35.23.1.1 may have a knob mutation (e.g., T139W as numbered with reference to SEQ ID NO:1) and at least 85% identity, at least 90% identity, or at least 95% identity to the sequence of SEQ ID NO:232. In some embodiments, clone CH3C.35.23.1.1 with the knob mutation has the sequence of SEQ ID NO:232.

[0380] In some embodiments, clone CH3C.35.23.1.1 may have a knob mutation (e.g., T139W as numbered with reference to SEQ ID NO:1), mutations that modulate effector function (e.g., L7A, L8A, and/or P102G (e.g., L7A and L8A) as numbered with reference to SEQ ID NO:1), and at least 85% identity, at least 90% identity, or at least 95% identity to the sequence of SEQ ID NO:233 or 234. In some embodiments, clone CH3C.35.23.1.1 with the knob mutation and the mutations that modulate effector function has the sequence of SEQ ID NO:233 or 234.

[0381] In some embodiments, clone CH3C.35.23.1.1 may have a knob mutation (e.g., T139W as numbered with reference to SEQ ID NO:1), mutations that increase serum stability (e.g., M25Y, S27T, and T29E as numbered with reference to SEQ ID NO:1), and at least 85% identity, at least 90% identity, or at least 95% identity to the sequence of SEQ ID NO:235. In some embodiments, clone CH3C.35.23.1.1 with the knob mutation and the mutations that increase serum stability has the sequence of SEQ ID NO:235.

[0382] In some embodiments, clone CH3C.35.23.1.1 may have a knob mutation (e.g., T139W as numbered with reference to SEQ ID NO:1), mutations that increase serum stability (e.g., N2075 with or without M201L as numbered with reference to SEQ ID NO:1), and at least 85% identity, at least 90% identity, or at least 95% identity to the sequence of SEQ ID NO:308. In some embodiments, clone CH3C.35.23.1.1 with the knob mutation and the mutations that increase serum stability has the sequence of SEQ ID NO:308.

[0383] In some embodiments, clone CH3C.35.23.1.1 may have a knob mutation (e.g., T139W as numbered with reference to SEQ ID NO:1), mutations that modulate effector function (e.g., L7A, L8A, and/or P102G (e.g., L7A and L8A) as numbered with reference to SEQ ID NO:1), mutations that increase serum stability (e.g., M25Y, S27T, and T29E as numbered with reference to SEQ ID NO:1), and at least 85% identity, at least 90% identity, or at least 95% identity to the sequence of SEQ ID NO:236 or 237. In some embodiments, clone CH3C.35.23.1.1 with the knob mutation, the mutations that modulate effector function, and the mutations that increase serum stability has the sequence of SEQ ID NO:236 or 237.

[0384] In some embodiments, clone CH3C.35.23.1.1 may have a knob mutation (e.g., T139W as numbered with reference to SEQ ID NO:1), mutations that modulate effector function (e.g., L7A, L8A, and/or P102G (e.g., L7A and L8A) as numbered with reference to SEQ ID NO:1), mutations that increase serum stability (e.g., N2075 with or without M201L as numbered with reference to SEQ ID NO:1), and at least 85% identity, at least 90% identity, or at least 95% identity to the sequence of SEQ ID NO:309 or 310. In some embodiments, clone CH3C.35.23.1.1 with the knob mutation, the mutations that modulate effector function, and the mutations that increase serum stability has the sequence of SEQ ID NO:309 or 310.

[0385] In some embodiments, clone CH3C.35.23.1.1 may have hole mutations (e.g., T139S, L141A, and Y180V as numbered with reference to SEQ ID NO:1) and at least 85% identity, at least 90% identity, or at least 95% identity to the sequence of SEQ ID NO:238. In some embodiments, clone CH3C.35.23.1.1 with the hole mutations has the sequence of SEQ ID NO:238.

[0386] In some embodiments, clone CH3C.35.23.1.1 may have hole mutations (e.g., T139S, L141A, and Y180V as numbered with reference to SEQ ID NO:1), mutations that modulate effector function (e.g., L7A, L8A, and/or P102G (e.g., L7A and L8A) as numbered with reference to SEQ ID NO:1), and at least 85% identity, at least 90% identity, or at least 95% identity to the sequence of SEQ ID NO:239 or 240. In some embodiments, clone CH3C.35.23.1.1 with the hole mutations and the mutations that modulate effector function has the sequence of SEQ ID NO:239 or 240.

[0387] In some embodiments, clone CH3C.35.23.1.1 may have hole mutations (e.g., T139S, L141A, and Y180V as numbered with reference to SEQ ID NO:1), mutations that increase serum stability (e.g., M25Y, S27T, and T29E as numbered with reference to SEQ ID NO:1), and at least 85% identity, at least 90% identity, or at least 95% identity to the sequence of SEQ ID NO:241. In some embodiments, clone CH3C.35.23.1.1 with the hole mutations and the mutations that increase serum stability has the sequence of SEQ ID NO:241.

[0388] In some embodiments, clone CH3C.35.23.1.1 may have hole mutations (e.g., T139S, L141A, and Y180V as numbered with reference to SEQ ID NO:1), mutations that increase serum stability (e.g., N2075 with or without M201L as numbered with reference to SEQ ID NO:1), and at least 85% identity, at least 90% identity, or at least 95% identity to the sequence of SEQ ID NO:311. In some embodiments, clone CH3C.35.23.1.1 with the hole mutations and the mutations that increase serum stability has the sequence of SEQ ID NO:311.

[0389] In some embodiments, clone CH3C.35.23.1.1 may have hole mutations (e.g., T139S, L141A, and Y180V as numbered with reference to SEQ ID NO:1), mutations that modulate effector function (e.g., L7A, L8A, and/or P102G (e.g., L7A and L8A) as numbered with reference to SEQ ID NO:1), mutations that increase serum stability (e.g., M25Y, S27T, and T29E as numbered with reference to SEQ ID NO:1), and at least 85% identity, at least 90% identity, or at least 95% identity to the sequence of SEQ ID NO:242 or 243. In some embodiments, clone CH3C.35.23.1.1 with the hole mutations, the mutations that modulate effector function, and the mutations that increase serum stability has the sequence of SEQ ID NO:242 or 243.

[0390] In some embodiments, clone CH3C.35.23.1.1 may have hole mutations (e.g., T139S, L141A, and Y180V as numbered with reference to SEQ ID NO:1), mutations that modulate effector function (e.g., L7A, L8A, and/or P102G (e.g., L7A and L8A) as numbered with reference to SEQ ID NO:1), mutations that increase serum stability (e.g., N2075 with or without M201L as numbered with reference to SEQ ID NO:1), and at least 85% identity, at least 90% identity, or at least 95% identity to the sequence of SEQ ID NO:312 or 313. In some embodiments, clone CH3C.35.23.1.1 with the hole mutations, the mutations that modulate effector function, and the mutations that increase serum stability has the sequence of SEQ ID NO:312 or 313.

### IV. CONJUGATES

[0391] In some embodiments, a transferrin receptor-binding polypeptide comprising a modified CH3 domain in accordance with the invention is linked to an agent, e.g., an agent that is to be internalized into a cell and/or for transcytosis across an endothelium, such as the blood-brain barrier, via a linker. The linker may be any linker suitable for joining an agent to the polypeptide. In some embodiments, the linkage is enzymatically cleavable. In certain embodiments, the linkage is cleavable by an enzyme present in the central nervous system.

[0392] In some embodiments, the linker is a peptide linker. The peptide linker may be configured such that it allows for the rotation of the agent and the transferrin receptor-binding polypeptide relative to each other; and/or is resistant to digestion by proteases. In some embodiments, the linker may be a flexible linker, e.g., containing amino acids such as Gly, Asn, Ser, Thr, Ala, and the like. Such linkers are designed using known parameters. For example, the linker may have repeats, such as Gly-Ser repeats.

[0393] In various embodiments, the conjugates can be generated using well-known chemical cross-linking reagents and protocols. For example, there are a large number of chemical cross-linking agents that are known to those skilled in the art and useful for cross-linking the polypeptide with an agent of interest. For example, the cross-linking agents are heterobifunctional cross-linkers, which can be used to link molecules in a stepwise manner. Heterobifunctional cross-linkers provide the ability to design more specific coupling methods for conjugating proteins, thereby reducing the occurrences of unwanted side reactions such as homo-protein polymers. A wide variety of heterobifunctional cross-linkers are known in the art, including N-hydroxysuccinimide (NETS) or its water soluble analog N-hydroxysulfosuccinimide (sulfo-NHS), succinimidyl 4-(N-maleimidomethyl)cyclohexane-1-carboxylate (SMCC), m-maleimidobenzoyl-N-hydroxysuccinimide ester (MBS); N-succinimidyl (4-iodoacetyl) aminobenzoate (STAB), succinimidyl 4-(p-maleimidophenyl)butyrate (SMPB), 1-ethyl-3-(3-dimethylaminopropyl)carbodiimide hydrochloride (EDC); 4-succinimidyloxycarbonyl-a-methyl-a-(2-pyridyldithio)-toluene (SMPT), N-succinimidyl 3-(2-pyridyldithio)propionate (SPDP), and succinimidyl 6-[3-(2-pyridyldithio)propionate]hexanoate (LC-SPDP). Those cross-linking agents having N-hydroxysuccinimide moieties can be obtained as the N-hydroxysulfosuccinimide analogs, which generally have greater water solubility. In addition, those cross-linking agents having disulfide bridges within the linking chain can be synthesized instead as the alkyl derivatives so as to reduce the amount of linker cleavage in vivo. In addition to the heterobifunctional cross-linkers, there exist a number of other cross-linking agents including homobifunctional and photoreactive cross-linkers. Disuccinimidyl subcrate (DSS), bismaleimidohexane (BMH) and dimethylpimelimidate.2HCl (DMP) are examples of useful homobifunctional cross-linking agents, and bis-[B-(4-azidosalicylamido)ethyl]disulfide (BASED) and N-succinimidyl-6(4′-azido-2′-nitrophenylamino)hexanoate (SANPAH) are examples of useful photoreactive cross-linkers.

[0394] The agent of interest may be a therapeutic agent, including a cytotoxic agent, a DNA or RNA molecule, a chemical moiety, and the like. In some embodiments, the agent may be a peptide or small molecule therapeutic or imaging agent. In some embodiments, the small molecule is less than 1000 Da, less than 750 Da, or less than 500 Da.

[0395] The agent of interest may be linked to the N-terminal or C-terminal region of the transferrin receptor-binding polypeptide, or attached to any region of the polypeptide, so long as the agent does not interfere with binding of the transferrin receptor-binding polypeptide to the transferrin receptor.

### V. NUCLEIC ACIDS, VECTORS, AND HOST CELLS

[0396] Modified transferrin receptor-binding polypeptides as described herein are typically prepared using recombinant methods. Accordingly, in some aspects, the invention provides isolated nucleic acids comprising a nucleic acid sequence encoding any of the polypeptides comprising polypeptides as described herein, and host cells into which the nucleic acids are introduced that are used to replicate the polypeptide-encoding nucleic acids and/or to express the polypeptides. In some embodiments, the host cell is eukaryotic, e.g., a human cell.

[0397] In another aspect, polynucleotides are provided that comprise a nucleotide sequence that encodes the polypeptides described herein. The polynucleotides may be single-stranded or double-stranded. In some embodiments, the polynucleotide is DNA. In particular embodiments, the polynucleotide is cDNA. In some embodiments, the polynucleotide is RNA.

[0398] In some embodiments, the polynucleotide is included within a nucleic acid construct. In some embodiments, the construct is a replicable vector. In some embodiments, the vector is selected from a plasmid, a viral vector, a phagemid, a yeast chromosomal vector, and a non-episomal mammalian vector.

[0399] In some embodiments, the polynucleotide is operably linked to one or more regulatory nucleotide sequences in an expression construct. In one series of embodiments, the nucleic acid expression constructs are adapted for use as a surface expression library. In some embodiments, the library is adapted for surface expression in yeast. In some embodiments, the library is adapted for surface expression in phage. In another series of embodiments, the nucleic acid expression constructs are adapted for expression of the polypeptide in a system that permits isolation of the polypeptide in milligram or gram quantities. In some embodiments, the system is a mammalian cell expression system. In some embodiments, the system is a yeast cell expression system.

[0400] Expression vehicles for production of a recombinant polypeptide include plasmids and other vectors. For instance, suitable vectors include plasmids of the following types: pBR322-derived plasmids, pEMBL-derived plasmids, pEX-derived plasmids, pBTac-derived plasmids, and pUC-derived plasmids for expression in prokaryotic cells, such as E. coli. The pcDNAI/amp, pcDNAI/neo, pRc/CMV, pSV2gpt, pSV2neo, pSV2-dhfr, pTk2, pRSVneo, pMSG, pSVT7, pko-neo, and pHyg-derived vectors are examples of mammalian expression vectors suitable for transfection of eukaryotic cells. Alternatively, derivatives of viruses such as the bovine papilloma virus (BPV-1), or Epstein-Barr virus (pHEBo, pREP-derived, and p205) can be used for transient expression of polypeptides in eukaryotic cells. In some embodiments, it may be desirable to express the recombinant polypeptide by the use of a baculovirus expression system. Examples of such baculovirus expression systems include pVL-derived vectors (such as pVL1392, pVL1393, and pVL941), pAcUW-derived vectors (such as pAcUW1), and pBlueBac-derived vectors. Additional expression systems include adenoviral, adeno-associated virus, and other viral expression systems.

[0401] Vectors may be transformed into any suitable host cell. In some embodiments, the host cells, e.g., bacteria or yeast cells, may be adapted for use as a surface expression library. In some cells, the vectors are expressed in host cells to express relatively large quantities of the polypeptide. Such host cells include mammalian cells, yeast cells, insect cells, and prokaryotic cells. In some embodiments, the cells are mammalian cells, such as Chinese Hamster Ovary (CHO) cell, baby hamster kidney (BHK) cell, NSO cell, YO cell, HEK293 cell, COS cell, Vero cell, or HeLa cell.

[0402] A host cell transfected with an expression vector encoding a transferrin receptor-binding polypeptide can be cultured under appropriate conditions to allow expression of the polypeptide to occur. The polypeptides may be secreted and isolated from a mixture of cells and medium containing the polypeptides. Alternatively, the polypeptide may be retained in the cytoplasm or in a membrane fraction and the cells harvested, lysed, and the polypeptide isolated using a desired method.

### VI. THERAPEUTIC METHODS

[0403] A transferrin receptor-binding polypeptide in accordance with the invention may be used therapeutically in many indications. In some embodiments, the transferrin receptor-binding polypeptide is used to deliver a therapeutic agent to a target cell type that expresses the transferrin receptor. In some embodiments, a transferrin receptor-binding polypeptide may be used to transport a therapeutic moiety across an endothelium, e.g., the blood-brain barrier, to be taken up by the brain.

[0404] In some embodiments, a transferrin receptor-binding polypeptide of the present invention may be used, e.g., conjugated to a therapeutic agent, to deliver the therapeutic agent to treat a neurological disorder such as a disease of the brain or central nervous system (CNS). Illustrative diseases include Alzheimer's Disease, Parkinson's disease, amyotrophic lateral sclerosis, frontotemporal dementia, vascular dementia, Lewy body dementia, Pick's disease, primary age-related tauopathy, or progressive supranuclear palsy. In some embodiments, the disease may be a tauopathy, a prion disease (such as bovine spongiform encephalopathy, scrapie, Creutzfeldt-Jakob syndrome, kuru, Gerstmann-Straussler-Scheinker disease, chronic wasting disease, and fatal familial insomnia), bulbar palsy, motor neuron disease, or a nervous system heterodegenerative disorders (such as Canavan disease, Huntington's disease, neuronal ceroid-lipofuscinosis, Alexander's disease, Tourette's syndrome, Menkes kinky hair syndrome, Cockayne syndrome, Halervorden-Spatz syndrome, lafora disease, Rett syndrome, hepatolenticular degeneration, Lesch-Nyhan syndrome, Friedreich's ataxia, Spinal muscular atrophy, and Unverricht-Lundborg syndrome). In some embodiments, the disease is stroke or multiple sclerosis. In some embodiments, the patient may be asymptomatic, but has a marker that is associated with the disease of the brain or CNS. In some embodiments, the use of a transferrin receptor-binding polypeptide of the present invention in the manufacture of a medicament for treating a neurological disorder is provided.

[0405] In some embodiments, a transferrin receptor-binding polypeptide of the present invention is used for the treatment of cancer. In certain embodiments, the cancer is a primary cancer of the CNS, such as glioma, glioblastoma multiforme, meningioma, astrocytoma, acoustic neuroma, chondroma, oligodendroglioma, medulloblastomas, ganglioglioma, Schwannoma, neurofibroma, neuroblastoma, or extradural, intramedullary or intradural tumors. In some embodiments, the cancer is a solid tumor, or in other embodiments, the cancer is a non-solid tumor. Solid-tumor cancers include tumors of the central nervous system, breast cancer, prostate cancer, skin cancer (including basal cell carcinoma, cell carcinoma, squamous cell carcinoma and melanoma), cervical cancer, uterine cancer, lung cancer, ovarian cancer, testicular cancer, thyroid cancer, astrocytoma, glioma, pancreatic cancer, mesotheliomas, gastric cancer, liver cancer, colon cancer, rectal cancer, renal cancer including nephroblastoma, bladder cancer, oesophageal cancer, cancer of the larynx, cancer of the parotid, cancer of the biliary tract, endometrial cancer, adenocarcinomas, small cell carcinomas, neuroblastomas, adrenocortical carcinomas, epithelial carcinomas, desmoid tumors, desmoplastic small round cell tumors, endocrine tumors, Ewing sarcoma family tumors, germ cell tumors, hepatoblastomas, hepatocellular carcinomas, non-rhabdomyosarcome soft tissue sarcomas, osteosarcomas, peripheral primitive neuroectodermal tumors, retinoblastomas, and rhabdomyosarcomas. In some embodiments, the use of a transferrin receptor-binding polypeptide of the present invention in the manufacture of a medicament for treating cancer is provided.

[0406] In some embodiments, a transferrin receptor-binding polypeptide of the present invention may be used in the treatment of an autoimmune or inflammatory disease. Examples of such diseases include, but are not limited to, ankylosing spondylitis, arthritis, osteoarthritis, rheumatoid arthritis, psoriatic arthritis, asthma, scleroderma, stroke, atherosclerosis, Crohn's disease, colitis, ulcerative colitis, dermatitis, diverticulitis, fibrosis, idiopathic pulmonary fibrosis, fibromyalgia, hepatitis, irritable bowel syndrome (IBS), lupus, systemic lupus erythematous (SLE), nephritis, multiple sclerosis, and ulcerative colitis. In some embodiments, the use of a transferrin receptor-binding polypeptide of the present invention in the manufacture of a medicament for treating an autoimmune or inflammatory disease is provided.

[0407] In some embodiments, a transferrin receptor-binding polypeptide of the present invention may be used in the treatment of a cardiovascular disease, such as coronary artery disease, heart attack, abnormal heart rhythms or arrhythmias, heart failure, heart valve disease, congenital heart disease, heart muscle disease, cardiomyopathy, pericardial disease, aorta disease, marfan syndrome, vascular disease, and blood vessel disease. In some embodiments, the use of a transferrin receptor-binding polypeptide of the present invention in the manufacture of a medicament for treating a cardiovascular disease is provided.

[0408] In some embodiments, the method further comprises administering to the subject one or more additional therapeutic agents. For example, in some embodiments for treating a disease of the brain or central nervous system, the method may comprise administering to the subject a neuroprotective agent, e.g., an anticholinergic agent, a dopaminergic agent, a glutamatergic agent, a histone deacetylase (HDAC) inhibitor, a cannabinoid, a caspase inhibitor, melatonin, an anti-inflammatory agent, a hormone (e.g., estrogen or progesterone), or a vitamin. In some embodiments, the method comprises administering to the subject an agent for use in treating a cognitive or behavioral symptom of a neurological disorder (e.g., an antidepressant, a dopamine agonist, or an anti-psychotic).

[0409] A transferrin receptor-binding polypeptide of the present invention is administered to a subject at a therapeutically effective amount or dose. Illustrative dosages include a daily dose range of about 0.01 mg/kg to about 500 mg/kg, or about 0.1 mg/kg to about 200 mg/kg, or about 1 mg/kg to about 100 mg/kg, or about 10 mg/kg to about 50 mg/kg, can be used. The dosages, however, may be varied according to several factors, including the chosen route of administration, the formulation of the composition, patient response, the severity of the condition, the subject's weight, and the judgment of the prescribing physician. The dosage can be increased or decreased over time, as required by an individual patient. In some embodiments, a patient initially is given a low dose, which is then increased to an efficacious dosage tolerable to the patient. Determination of an effective amount is well within the capability of those skilled in the art.

[0410] In various embodiments, a transferrin receptor-binding polypeptide of the present invention is administered parenterally. In some embodiments, the polypeptide is administered intravenously. Intravenous administration can be by infusion, e.g., over a period of from about 10 to about 30 minutes, or over a period of at least 1 hour, 2 hours, or 3 hours. In some embodiments, the polypeptide is administered as an intravenous bolus. Combinations of infusion and bolus administration may also be used.

[0411] In some parenteral embodiments, a transferrin receptor-binding polypeptide is administered intraperiotneally, subcutaneously, intradermally, or intramuscularly. In some embodiments, the polypeptide is administered intradermally or intramuscularly. In some embodiments, the polypeptide is administered intrathecally, such as by epidural administration, or intracerebroventricularly.

[0412] In other embodiments, a transferrin receptor-binding polypeptide may be administered orally, by pulmonary administration, intranasal administration, intraocular administration, or by topical administration. Pulmonary administration can also be employed, e.g., by use of an inhaler or nebulizer, and formulation with an aerosolizing agent.

### VII. PHARMACEUTICAL COMPOSITIONS AND KITS

[0413] In another aspect, pharmaceutical compositions and kits comprising a transferrin receptor-binding polypeptide in accordance with the invention are provided.

### Pharmaceutical Compositions

[0414] Guidance for preparing formulations for use in the present invention can be found in any number of handbooks for pharmaceutical preparation and formulation that are known to those of skill in the art.

[0415] In some embodiments, a pharmaceutical composition comprises a transferrin receptor-binding polypeptide as described herein and further comprises one or more pharmaceutically acceptable carriers and/or excipients. A pharmaceutically acceptable carrier includes any solvents, dispersion media, or coatings that are physiologically compatible and that preferably does not interfere with or otherwise inhibit the activity of the active agent. Various pharmaceutically acceptable excipients are well-known.

[0416] In some embodiments, the carrier is suitable for intravenous, intrathecal, intracerebroventricular, intramuscular, oral, intraperitoneal, transdermal, topical, or subcutaneous administration. Pharmaceutically acceptable carriers can contain one or more physiologically acceptable compounds that act, for example, to stabilize the composition or to increase or decrease the absorption of the polypeptide. Physiologically acceptable compounds can include, for example, carbohydrates, such as glucose, sucrose, or dextrans, antioxidants, such as ascorbic acid or glutathione, chelating agents, low molecular weight proteins, compositions that reduce the clearance or hydrolysis of the active agents, or excipients or other stabilizers and/or buffers. Other pharmaceutically acceptable carriers and their formulations are also available in the art.

[0417] The pharmaceutical compositions described herein can be manufactured in a manner that is known to those of skill in the art, e.g., by means of conventional mixing, dissolving, granulating, dragee-making, emulsifying, encapsulating, entrapping, or lyophilizing processes. The following methods and excipients are merely exemplary and are in no way limiting.

[0418] For oral administration, a transferrin receptor-binding polypeptide can be formulated by combining it with pharmaceutically acceptable carriers that are well-known in the art. Such carriers enable the compounds to be formulated as tablets, pills, dragees, capsules, emulsions, lipophilic and hydrophilic suspensions, liquids, gels, syrups, slurries, suspensions and the like, for oral ingestion by a patient to be treated. Pharmaceutical preparations for oral use can be obtained by mixing the polypeptides with a solid excipient, optionally grinding a resulting mixture, and processing the mixture of granules, after adding suitable auxiliaries, if desired, to obtain tablets or dragee cores. Suitable excipients include, for example, fillers such as sugars, including lactose, sucrose, mannitol, or sorbitol; cellulose preparations such as, for example, maize starch, wheat starch, rice starch, potato starch, gelatin, gum tragacanth, methyl cellulose, hydroxypropylmethyl-cellulose, sodium carboxymethylcellulose, and/or polyvinylpyrrolidone. If desired, disintegrating agents can be added, such as a cross-linked polyvinyl pyrrolidone, agar, or alginic acid or a salt thereof such as sodium alginate.

[0419] As disclosed above, a transferrin receptor-binding polypeptide as described herein can be formulated for parenteral administration by injection, e.g., by bolus injection or continuous infusion. For injection, the polypeptides can be formulated into preparations by dissolving, suspending, or emulsifying them in an aqueous or nonaqueous solvent, such as vegetable or other similar oils, synthetic aliphatic acid glycerides, esters of higher aliphatic acids or propylene glycol; and if desired, with conventional additives such as solubilizers, isotonic agents, suspending agents, emulsifying agents, stabilizers, and preservatives. In some embodiments, polypeptides can be formulated in aqueous solutions, preferably in physiologically compatible buffers such as Hanks's solution, Ringer's solution, or physiological saline buffer. Formulations for injection can be presented in unit dosage form, e.g., in ampules or in multi-dose containers, with an added preservative. The compositions can take such forms as suspensions, solutions, or emulsions in oily or aqueous vehicles, and can contain formulatory agents such as suspending, stabilizing, and/or dispersing agents.

[0420] In some embodiments, a transferrin receptor-binding polypeptide is prepared for delivery in a sustained-release, controlled release, extended-release, timed-release, or delayed-release formulation, for example, in semi-permeable matrices of solid hydrophobic polymers containing the active agent. Various types of sustained-release materials have been established and are well-known by those skilled in the art. Extended-release formulations include film-coated tablets, multiparticulate or pellet systems, matrix technologies using hydrophilic or lipophilic materials and wax-based tablets with pore-forming excipients. Sustained-release delivery systems can, depending on their design, release the compounds over the course of hours or days, for instance, over 4, 6, 8, 10, 12, 16, 20, 24 hours or more. Usually, sustained release formulations can be prepared using naturally occurring or synthetic polymers, for instance, polymeric vinyl pyrrolidones, such as polyvinyl pyrrolidone; carboxyvinyl hydrophilic polymers; hydrophobic and/or hydrophilic hydrocolloids, such as methylcellulose, ethylcellulose, hydroxypropylcellulose, and hydroxypropylmethylcellulose; and carboxypolymethylene.

[0421] Typically, a pharmaceutical composition for use in in vivo administration is sterile. Sterilization can be accomplished according to methods known in the art, e.g., heat sterilization, steam sterilization, sterile filtration, or irradiation.

[0422] Dosages and desired drug concentration of pharmaceutical compositions of the invention may vary depending on the particular use envisioned. The determination of the appropriate dosage or route of administration is well within the skill of one in the art. Suitable dosages are also described in Section VII above.

### Kits

[0423] In some embodiments, kits comprising a transferrin receptor-binding polypeptide as described herein are provided. In some embodiments, the kits are for use in preventing or treating a neurological disorder such as a disease of the brain or central nervous system (CNS).

[0424] In some embodiments, the kit further comprises one or more additional therapeutic agents. For example, in some embodiments, the kit comprises a transferrin receptor-binding polypeptide as described herein and further comprises one or more additional therapeutic agents for use in the treatment of a neurological disorder. In some embodiments, the kit further comprises instructional materials containing directions (i.e., protocols) for the practice of the methods described herein (e.g., instructions for using the kit for administering a composition across the blood-brain barrier). While the instructional materials typically comprise written or printed materials, they are not limited to such. Any medium capable of storing such instructions and communicating them to an end user is contemplated by this invention. Such media include, but are not limited to, electronic storage media (e.g., magnetic discs, tapes, cartridges, chips), optical media (e.g., CD-ROM), and the like. Such media may include addresses to internet sites that provide such instructional materials.

### VIII. EXAMPLES

[0425] The present invention will be described in greater detail by way of specific examples. The following examples are offered for illustrative purposes only, and are not intended to limit the invention in any manner. Those of skill in the art will readily recognize a variety of noncritical parameters which can be changed or modified to yield essentially the same results. Efforts have been made to ensure accuracy with respect to numbers used (e.g., amounts, temperatures, etc.), but some experimental error and deviation may be present. The practice of the present invention will employ, unless otherwise indicated, conventional methods of protein chemistry, biochemistry, recombinant DNA techniques and pharmacology, within the skill of the art. Such techniques are explained fully in the literature. Additionally, it should be apparent to one of skill in the art that the methods for engineering as applied to certain libraries can also be applied to other libraries described herein.

### Example 1

### Generation of TfR Target

[0426] DNA encoding the transferrin receptor (TfR) ectodomain (ECD) (residues 121-760 of the human (SEQ ID NO:38) or cyno (SEQ ID NO:103) TfR) was cloned into a mammalian expression vector with C-terminal cleavable His- and Avi-tags. The plasmid was transfected and expressed in HEK293 cells. The ectodomain was purified from the harvested supernatant using Ni-NTA chromatography followed by size-exclusion chromatography to remove any aggregated protein. The yield was about 5 mg per liter of culture. The protein was stored in 10 mM K₃PO₄ (pH 6.7), 100 mM KCl, 100 mM NaCl, and 20% glycerol and frozen at −20° C.

[0427] DNA encoding the permutated TfR apical domain (SEQ ID NO:104) (residues 326-379 and 194-296 of the human or cyno TfR) was cloned into a pET28 vector with an N-terminal His-tag for purification and an Avi-tag for in vivo biotinylation. The plasmid was co-transformed with a BirA expression vector into BL21 (DE3) cells. Cells were grown in LB media at 37° C. until log phase, and then induced with 1 mM isopropyl 1-thio-β-D-galactopyranoside (IPTG) followed by culture overnight at 18° C. The cells were lysed and the soluble fraction was applied to an Ni-NTA column for affinity purification followed by size-exclusion chromatography to remove any aggregated protein. The yield was about 10 mg per liter of culture. The protein was stored in 50 mM HEPES (pH 7.5), 150 mM NaCl, and 1 mM DTT and frozen at −20° C.

[0428] The purified TfR ECDs were biotinylated using an EZ-link sulfo-NHS-LC-Biotin kit (obtained from Thermo Scientific). Five-fold molar excess of biotin was used for the reaction. The excess biotin was removed by extensively dialyzing against PBS.

[0429] The Avi-tagged TfR ECDs and apical domains was biotinylated using BirA-500 (BirA biotin-protein ligase standard reaction kit from Avidity, LLC). After reaction, the labeled proteins were further purified by size-exclusion chromatography to remove excess BirA enzyme. The final material was stored in 10 mM K₃PO₄ (pH 6.7), 100 mM KCl, 100 mM NaCl, and 20% glycerol and frozen at −20° C.

### Example 2

### Design and Characterization of Engineered Transferrin Receptor Binding Polypeptides

[0430] This example describes the design, generation, and characterization of polypeptides of the present invention. For the purposes of this example and comparing the amino acids that are the same in clone sequences, a “conserved” mutation is considered to be one that occurred in all of the identified clones (not a conservative amino acid substitution), while a “semi-conserved” mutation is one that occurs in >50% of clones.

[0431] Unless otherwise indicated, the positions of amino acid residues in this section are numbered based on SEQ ID NO:1, a human IgG1 wild-type Fc region having three residues from the hinge, PCP, at the amino-terminal end.

### Design of Polypeptide Fc Region Domain Libraries

[0432] New molecular recognition was engineered into polypeptide Fc regions by selecting certain solvent exposed surface patches for modification, constructing surface display libraries in which the amino acid composition of the selected patch was altered by randomization and then screening the surface-displayed sequence variants for desired functionality using standard expression display techniques. As used herein, the term “randomization” includes partial randomization as well as sequence changes with pre-defined nucleotide or amino acid mixing ratios. Typical surface-exposed patches selected for randomization had areas between about 600 to 1500 Å², and comprised about 7 to 15 amino acids.

### Clone Register

[0433] The following register was designed and generated according to the methods described herein. As used herein, the term “register” refers to a series of surface-exposed amino acid residues that form a contiguous surface that can be altered (e.g., by the introduction of mutations into the polypeptide coding gene sequences to produce amino acid substitutions, insertions, and/or deletions at the positions listed in the register).

[0434] CH3 Register C

[0435] The CH3C register (Table 1) included amino acid positions 157, 159, 160, 161, 162, 163, 186, 189, and 194 as numbered with reference to the human IgG1 Fc region amino acid sequence set forth in SEQ ID NO:1. The CH3C register positions form a contiguous surface by including surface-exposed residues from two loops, both distant from the FcyR and FcRn binding sites.

### Generation of Phage-Display Libraries

[0436] A DNA template coding for the wild-type human Fc sequence (SEQ ID NO:1) was synthesized and incorporated into a phagemid vector. The phagemid vector contained an ompA or pelB leader sequence, the Fc insert fused to c-Myc and 6×His epitope tags, and an amber stop codon followed by M13 coat protein pIII.

[0437] Primers containing “NNK” tricodons at the corresponding positions for randomization were generated, where N is any DNA base (i.e., A, C, G, or T) and K is either G or T. Alternatively, primers for “soft” randomization were used, where a mix of bases corresponding to 70% wild-type base and 10% of each of the other three bases was used for each randomization position. Libraries were generated by performing PCR amplification of fragments of the Fc region corresponding to regions of randomization and then assembled using end primers containing SfiI restriction sites, then digested with SfiI and ligated into the phagemid vectors. Alternatively, the primers were used to conduct Kunkel mutagenesis. Methods of performing Kunkel mutagenesis will be known to one of skill in the art. The ligated products or Kunkel products were transformed into electrocompetent E. coli cells of strain TG1 (obtained from Lucigen®)). The E. coli cells were infected with M13K07 helper phage after recovery and grown overnight, after which library phage were precipitated with 5% PEG/NaCl, resuspended in 15% glycerol in PBS, and frozen until use. Typical library sizes ranged from about 10⁹ to about 10¹¹ transformants. Fc-dimers were displayed on phage via pairing between pIII-fused Fc and soluble Fc not attached to pIII (the latter being generated due to the amber stop codon before pIII).

### Generation of Yeast-Display Libraries

[0438] A DNA template coding for the wild-type human Fc sequence was synthesized and incorporated into a yeast display vector. For CH3 libraries, the Fc polypeptides were displayed on the Aga2p cell wall protein. Both vectors contained prepro leader peptides with a Kex2 cleavage sequence, and a c-Myc epitope tag fused to the terminus of the Fc.

[0439] Yeast display libraries were assembled using methods similar to those described for the phage libraries, except that amplification of fragments was performed with primers containing homologous ends for the vector. Freshly prepared electrocompetent yeast (i.e., strain EBY100) were electroporated with linearized vector and assembled library inserts. Electroporation methods will be known to one of skill in the art. After recovery in selective SD-CAA media, the yeast were grown to confluence and split twice, then induced for protein expression by transferring to SG-CAA media. Typical library sizes ranged from about 10⁷ to about 10⁹ transformants. Fc-dimers were formed by pairing of adjacently displayed Fc monomers.

### General Methods for Phage Selection

[0440] Phage methods were adapted from Phage Display: A Laboratory Manual (Barbas, 2001). Additional protocol details can be obtained from this reference.

[0441] Plate Sorting Methods

[0442] Human TfR target was coated on MaxiSorp microtiter plates (typically 200 μL at 1-10 μg/mL in PBS) overnight at 4° C. All binding was done at room temperature unless otherwise specified. The phage libraries were added into each well and incubated overnight for binding. Microtiter wells were washed extensively with PBS containing 0.05% Tween® 20 (PBST) and bound phage were eluted by incubating the wells with acid (typically 50 mM HCl with 500 mM KCl, or 100 mM glycine, pH 2.7) for 30 minutes. Eluted phage were neutralized with 1 M Tris (pH 8) and amplified using TG1 cells and M13/K07 helper phage and grown overnight at 37° C. in 2YT media containing 50 μg/mL carbenacillin and 50 ug/mL Kanamycin. The titers of phage eluted from a target-containing well were compared to titers of phage recovered from a non-target-containing well to assess enrichment. Selection stringency was increased by subsequently decreasing the incubation time during binding and increasing washing time and number of washes.

[0443] Bead Sorting Methods

[0444] Human TfR target was biotinylated through free amines using NHS-PEG4-Biotin (obtained from Pierce™). For biotinylation reactions, a 3- to 5-fold molar excess of biotin reagent was used in PBS. Reactions were quenched with Tris followed by extensive dialysis in PBS. The biotinylated target was immobilized on streptavidin-coated magnetic beads, (i.e., M280-streptavidin beads obtained Thermo Fisher). The phage display libraries were incubated with the target-coated beads at room temperature for 1 hour. The unbound phage were then removed and beads were washed with PBST. The bound phage were eluted by incubating with 50 mM HC1 containing 500 mM KCl (or 0.1 M glycine, pH 2.7) for 30 minutes, and then neutralized and propagated as described above for plate sorting.

[0445] After three to five rounds of panning, single clones were screened by either expressing Fc on phage or solubly in the E. coli periplasm. Such expression methods will be known to one of skill in the art. Individual phage supernatants or periplasmic extracts were exposed to blocked ELISA plates coated with target or a negative control and were subsequently detected using HRP-conjugated goat anti-Fc (obtained from Jackson Immunoresearch) for periplasmic extracts or anti-M13 (GE Healthcare) for phage, and then developed with TMB reagent (obtained from Thermo Fisher). Wells with OD₄₅₀ values greater than around 5-fold over background were considered positive clones and sequenced, after which some clones were expressed either as a soluble Fc fragment or fused to Fab fragments.

### General Methods for Yeast Selection

[0446] Bead Sorting (Magnetic-Assisted Cell Sorting (MACS)) Methods

[0447] MACS and FACS selections were performed similarly to as described in Ackerman, et al. 2009 Biotechnol. Prog. 25(3), 774. Streptavidin magnetic beads (e.g., M-280 streptavidin beads from ThermoFisher) were labeled with biotinylated target and incubated with yeast (typically 5-10× library diversity). Unbound yeast were removed, the beads were washed, and bound yeast were grown in selective media and induced for subsequent rounds of selection.

[0448] Fluorescence-Activated Cell Sorting (FACS) Methods

[0449] Yeast were labeled with anti-c-Myc antibody to monitor expression and biotinylated target (concentration varied depending on the sorting round). In some experiments, the target was pre-mixed with streptavidin-Alexa Fluor® 647 in order to enhance the avidity of the interaction. In other experiments, the biotinylated target was detected after binding and washing with streptavidin-Alexa Fluor® 647. Singlet yeast with binding were sorted using a FACS Aria III cell sorter. The sorted yeast were grown in selective media then induced for subsequent selection rounds.

[0450] After an enriched yeast population was achieved, yeast were plated on SD-CAA agar plates and single colonies were grown and induced for expression, then labeled as described above to determine their propensity to bind to the target. Positive single clones were subsequently sequenced for binding target, after which some clones were expressed either as a soluble Fc fragment or as fused to Fab fragments.

### General Methods for Screening

[0451] Screening by ELISA

[0452] Clones were selected from panning outputs and grown in individual wells of 96-well deep-well plates. The clones were either induced for periplasmic expression using autoinduction media (obtained from EMD Millipore) or infected with helper phage for phage-display of the individual Fc variants on phage. The cultures were grown overnight and spun to pellet E. coli. For phage ELISA, phage containing supernatant was used directly. For periplasmic expression, pellets were resuspended in 20% sucrose, followed by dilution at 4:1 with water, and shaken at 4° C. for 1 hour. Plates were spun to pellet the solids and supernatant was used in the ELISA.

[0453] ELISA plates were coated with target, typically at 0.5 mg/mL overnight, then blocked with 1% BSA before addition of phage or periplasmic extracts. After a 1-hour incubation and washing off unbound protein, HRP-conjugated secondary antibody was added (i.e., anti-Fc or anti-M13 for soluble Fc or phage-displayed Fc, respectively) and incubated for 30 minutes. The plates were washed again, and then developed with TMB reagent and quenched with 2N sulfuric acid. Absorbance at 450 nm was quantified using a plate reader (BioTek®) and binding curves were polotted using Prism software where applicable. Absorbance signal for tested clones was compared to negative control (phage or paraplasmic extract lacking Fc). In some assays, soluble holo-transferrin was added during the binding step, typically at significant molar excess (greater than 10-fold excess).

[0454] Screening by Flow Cytometry

[0455] Fc variant polypeptides (expressed either on phage, in periplasmic extracts, or solubly as fusions to Fab fragments) were added to cells in 96-well V-bottom plates (about 100,000 cells per well in PBS+1%BSA (PBSA)), and incubated at 4° C. for 1 hour. The plates were subsequently spun and the media was removed, and then the cells were washed once with PBSA. The cells were resuspended in PBSA containing secondary antibody (goat anti-human-IgG-Alexa Fluor® 647 (obtained from Thermo Fisher)). After 30 minutes, the plates were spun and the media was removed, the cells were washed 1-2 times with PBSA, and then the plates were read on a flow cytometer (i.e., a FACSCanto™ II flow cytometer). Median fluorescence values were calculated for each condition using FlowJo software and binding curves were plotted with Prism software.

### CH3C Clone Generation and Characterization

[0456] Selections with CH3C Library Against Transferrin Receptor (TfR)

[0457] Yeast libraries against CH3C were panned and sorted against TfR as described above. Population enrichment FACS plots for the first three sort rounds are shown in FIG. 1. After an additional two rounds of sorting, single clones were sequenced and four unique sequences (i.e., clones CH3C.1 (SEQ ID NO:4), CH3C.2 (SEQ ID NO:5), CH3C.3 (SEQ ID NO:6), and CH3C.4 (SEQ ID NO:7)) were identified. These sequences had a conserved Trp at position 161, and all had an aromatic residue (i.e., Trp, Tyr, or His) at position 194. There was a great deal of diversity at other positions.

[0458] Characterization of First Generation CH3C Clones

[0459] The four clones selected from the CH3C library were expressed as Fc fusions to Fab fragments in CHO or 293 cells, and purified by Protein A and size-exclusion chromatography, and then screened for binding to cyno and human TfR in the presence or absence of holo-Tf by ELISA. As shown in FIG. 2, the clones all bound to human TfR and the binding was not affected by the addition of excess (5 μM) holo-Tf. However, the clones did not bind appreciably to cyno TfR. Clones were also tested for binding to 293F cells, which endogenously express human TfR. FIG. 3 shows that while the clones bound to 293F cells, the overall binding was substantially weaker than the high-affinity positive control.

[0460] Next it was tested whether clone CH3C.3 could internalize in TfR-expressing cells. Adherent HEK293 cells were grown in 96-well plates to about 80% confluence, media was removed, and samples were added at 1 μM concentrations: CH3C.3 anti-TfR benchmark positive control antibody (Ab204), anti-BACE1 benchmark negative control antibody (Ab107), and human IgG isotype control (obtained from Jackson Immunoresearch). The cells were incubated at 37° C. and 8% CO₂ concentration for 30 minutes, then washed, permeabilized with 0.1% Triton™ X-100, and stained with anti-human-IgG-Alexa Fluor® 488 secondary antibody. After additional washing, the cells were imaged under a high content fluorescence microscope (i.e., an Opera Phenix™ system), and the number of puncta per cell was quantified, as shown in FIG. 4. At 1 clone CH3C.3 showed a similar propensity for internalization to the positive anti-TfR control, while the negative controls showed no internalization.

[0461] Secondary Engineering of CH3C clones

[0462] Additional libraries were generated to improve the affinity of the initial CH3C hits against human TfR, and to attempt to introduce binding to cyno TfR. A soft randomization approach was used, wherein DNA oligos were generated to introduce soft mutagenesis based on each of the original four hits. The first portion of the register (WESXGXXXXXYK; SEQ ID NO:34) and the second portion of the register (TVXKSXWQQGXV; SEQ ID NO:35) were built via separate fragments, so the soft randomized registers were shuffled during PCR amplification (e.g., the first portion of the register from clone CH3C.1 was mixed with the second portion of the register from clones CH3C.1, CH3C.2, CH3C.3, and CH3C.4, and so forth). The fragments were all mixed and then introduced into yeast for surface expression and selection.

[0463] The selection scheme is shown in FIG. 5. After one round of MACS and three rounds of FACS, individual clones were sequenced (clones CH3C.17 (SEQ ID NO:8), CH3C.18 (SEQ ID NO:9), CH3C.21 (SEQ ID NO:10), CH3C.25 (SEQ ID NO:11), CH3C.34 (SEQ ID NO:12), CH3C.35 (SEQ ID NO:13), CH3C.44 (SEQ ID NO:14), and CH3C.51 (SEQ ID NO:15)). The selected clones fell into two general sequence groups. Group 1 clones (i.e., clones CH3C.18, CH3C.21, CH3C.25, and CH3C.34) had a semi-conserved Leu at position 157, a Leu or His at position 159, a conserved and a semi-conserved Val at positions 160 and 162, respectively, and a semi-conserved P-T-W motif at positions 186, 189, and 194, respectively. Group 2 clones had a conserved Tyr at position 157, the motif TXWSX (SEQ ID NO:341) at positions 159-163, and the conserved motif S/T-E-F at positions 186, 189, and 194, respectively. Clones CH3C.18 and CH3.35 were used in additional studies as representative members of each sequence group. It was noted that clone CH3C.51 had the first portion of its register from group 1 and the second portion of its register from group 2.

[0464] Binding Characterization of CH3C Clones from the Soft Mutagenesis Library

[0465] Clones from the soft mutagenesis library were reformatted as Fc-Fab fusion polypeptides and expressed and purified as described above. As shown in FIG. 7, these variants had improved ELISA binding to human TfR as compared to the top clone from the initial library selections (CH3C.3), and also did not compete with holo-Tf. The EC₅₀ values, as shown below in Table 2, were not appreciably affected beyond the margin of error of the experiment by the presence or absence of holo-Tf.

TABLE 2
EC₅₀ values (nM) for ELISA binding of CH3C variants to TfR
in the presence or absence of holo-Tf

| Clone | −Tf | +Tf |
|---|---|---|
| CH3C.3 | 8.1 | 6.3 |
| CH3C.17 | 5.3 | 17 |
| CH3C.18 | 6.9 | 3.5 |
| CH3C.25 | 51 | 48 |
| CH3C.35 | 0.49 | 0.61 |
| CH3C.51 | 160 | 36 |
| Ab204 | 1.6 | 0.24 |

[0466] Notably, clone CH3C.35 bound to human TfR about as well as the high affinity anti-TfR control antibody Ab204. The clones selected from the soft randomization library also had improved cell binding to 293F cells, as shown in FIG. 8. In a similar cell binding assay, these clones were tested for binding to CHO-K1 cells that stably express high levels of human or cyno TfR on their surface. The clones selected from the soft randomization library bound to cells expressing human TfR (FIG. 9A) as well as cyno TfR (FIG. 9B) and did not bind to the parental CHO-K1 cells (FIG. 9C). The magnitude and binding EC₅₀ values were substantially lower for cyno TfR as compared to human TfR. Data is summarized in Table 3 below.

TABLE 3
EC₅₀ and max. MFI (Median Fluorescence Intensity) values for
CH3C clones binding to cells

| | 293F | | CHO- | CHO-huTf | CHO- | CHO-cyTfR |
|---|---|---|---|---|---|---|
| | EC50 | 293F MFI | huTfR EC₅₀ | MFI at 200 | cyTfR EC₅₀ | MFI at 200 |
| Clone | (nM) | at 200 nM | (nM) | nM | (nM) | nM |
| CH3C.3 | n.d. | 1385 | 6.5 | 10296 | n.d. | 941 |
| CH3C.17 | n.d. | 1556 | 4.2 | 13933 | >50 | 8205 |
| CH3C.18 | 22 | 2100 | 2.3 | 22997 | 6.6 | 9614 |
| CH3C.25 | n.d. | 314 | 17 | 11434 | >50 | 12515 |
| CH3C.35 | 0.67 | 1481 | 2.6 | 22059 | 11 | 8292 |
| CH3C.51 | n.d. | 784 | 27 | 11892 | >50 | 14455 |
| Ab204 | 0.25 | 3404 | 1.8 | 35744 | 2.4 | 41041 |

[0467] Epitope Mapping

[0468] To determine whether the engineered CH3C Fc regions bound to the apical domain of TfR, TfR apical domain (SEQ ID NOS:30 and 31 for human and cyno, respectively) was expressed on the surface of phage. To properly fold and display the apical domain, one of the loops had to be truncated and the sequence needed to be circularly permuted; the sequences expressed on phage are identified as SEQ ID NOS:32 and 33 for human and cyno, respectively. Clones CH3C.18 and CH3C.35 were coated on ELISA plates and the previously described phage ELISA protocol was followed. Briefly, after washing and blocking with 1% PBSA, dilutions of phage displaying were added and incubated at room temperature for 1 hour. The plates were subsequently washed and anti-M13-HRP was added, and after additional washing the plates were developed with TMB substrate and quenched with 2N H₂SO₄. Both CH3C.18 and CH3C.35 bound to the apical domain in this assay.

[0469] Since binding to cyno TfR was known to be much weaker than binding to human TfR, it was hypothesized that one or more of the amino acid differences between cyno and human apical domains was likely responsible for the binding difference. Therefore, a series of six point mutations was made in the human TfR apical domain where the human residue was replaced with the corresponding cyno residue. These mutants were displayed on phage and the phage concentrations were normalized by OD₂₆₈ and binding to CH3C.18 and CH3C.35 was tested by phage ELISA titration (FIGS. 11B and 11C). Capture on anti-Myc antibody 9E10 showed that display levels for all mutants were similar (FIG. 11A). Binding to the human TfR mutations clearly showed a strong effect of the R208G mutation, which suggested that this residue is a key part of the epitope and is negatively impacted by the cyno residue at this position. The G208R mutation was made on phage-displayed cyno apical domain and it was shown that this mutation dramatically improved binding to cyno apical domain (FIGS. 11D and 11E). These results show that the CH3C clones bound to the apical domain of TfR and that position 208 was important for binding, while positions 247, 292, 364, 370, and 372 were significantly less important.

[0470] Paratope Mapping

[0471] To understand which residues in the Fc domain were most critical for TfR binding, a series of mutant CH3C.18 and CH3C.35 clones was created in which each mutant had a single position in the TfR-binding register mutated back to wild-type. The resulting variants were expressed recombinantly as CH3C Fc-Fab fusions and tested for binding to human or cyno TfR (FIG. 12). For CH3C.35, positions 161 and 194 were absolutely critical for binding; reversion of either of these to wild-type completely ablated binding to human TfR. Surprisingly, reverting position 163 to wild-type provided a dramatic boost to cyno TfR binding, while having little effect on human binding. Conversely, the reversion of residue 163 to wild-type had little effect in CH3C.18, but in this variant reversion of positions 189 and 194 completely abolished binding to human TfR. In both variants, other single reversions had modest (detrimental) impact on human TfR binding, while in many cases binding to cyno TfR was abolished.

[0472] Additional Engineering to Improve Binding to Cyno TfR

[0473] Additional libraries were prepared to further increase the affinity of the CH3C variants for cyno TfR. These libraries were designed to be of less than about 10⁷ clones in terms of theoretical diversity, so that the full diversity space could be explored using yeast surface display. The design of these libraries is shown in FIGS. 13A-13D. Four library designs were used; all libraries were generated using degenerate oligos with NNK or other degenerate codon positions, and amplified by overlap PCR, as described above.

[0474] The first library was based on the consensus of CH3C.35-like sequences (FIG. 13A). Here, positions 157-161 were held constant as YGTEW (SEQ ID NO:36), while positions 162, 163, 186, 189, and 194 were mutated using saturation mutagenesis.

[0475] The second library was based on the consensus of CH3C.18-like sequences (FIG. 13B). Here, position 157 was restricted to Leu and Met, position 159 was restricted to Leu and His, position 160 was held constant as Val, position 161 was restricted to Trp and Gly, position 162 was restricted to Val and Ala, position 163 was fully randomized, position 164 was added to the register and fully randomized, position 186 was soft randomized, position 189 was fully randomized, and position 194 was restricted to aromatic amino acids and Leu.

[0476] The third library added new randomized positions to the library (FIG. 13C). Two versions were generated, one each with CH3C.18 and CH3C.35 as the starting register, and then additional positions were randomized by saturation mutagenesis: E153, E155, Y164, S188, and Q192.

[0477] The fourth library held certain positions constant for CH3C.18 but allowed variation at other positions, with less bias than the consensus library (FIG. 13D). Positions 160, 161, and 186 were fixed, and positions 157, 159, 162, 163, and 189 were randomized by saturating mutagenesis; position 194 was mutated but restricted to aromatic residues and Leu.

[0478] The libraries were selected in yeast for four to five rounds against cynoTfR and single clones were sequenced and converted to polypeptide-Fab fusions, as described above. The greatest enrichment in cynoTfR binding was observed from the second library (i.e., derivatives of the CH3.18 parent), though there was also some loss in huTfR binding.

[0479] Binding Characterization of CH3C Maturation Clones

[0480] Binding ELISAs were conducted with purified CH3C Fc-Fab fusion variants with human or cyno TfR coated on the plate, as described above. The variants from the CH3C.18 maturation library, CH3C3.2-1, CH3C.3.2-5, and CH3C.3.2-19, bound human and cyno TfR with approximately equivalent EC₅₀ values, whereas the parent clone CH3C.18, and CH3C.35, had greater than 10-fold better binding to human versus cyno TfR (FIG. 14).

[0481] Next, it was tested whether the new polypeptides internalized in human and monkey cells. Using the protocol previously described above in the section titled “Characterization of first generation CH3C clones,” internalization in human HEK293 cells and rhesus LLC-MK2 cells was tested. As shown in FIG. 15, the variants that similarly bound human and cyno TfR, CH3C.3.2-5 and CH3C.3.2-19, had significantly improved internalization in LLC-MK2 cells as compared with CH3C.35.

[0482] Additional Engineering of CH3C Clones

[0483] Additional engineering to further affinity mature clones CH3C.18 and CH3C.35 involved adding additional mutations to the backbone (i.e., non-register) positions that enhanced binding through direct interactions, second-shell interactions, or structure stabilization. This was achieved via generation and selection from an “NNK walk” or “NNK patch” library. The NNK walk library involved making one-by-one NNK mutations of residues that are near to the paratope. By looking at the structure of Fc bound to FcgRI (PDB ID: 4W40), 44 residues near the original library register, as shown in FIG. 16, were identified as candidates for interrogation. Specifically, the following residues were targeted for NNK mutagenesis: K21, R28, Q115, R117, E118, Q120, T132, K133, N134, Q135, 5137, K143, E153, E155, 5156, G158, Y164, K165, T166, D172, 5173, D174, 5176, K182, L183, T184, V185, K187, S188, Q191, Q192, G193, V195, F196, S197, S199, Q211, 5213, 5215, L216, 5217, P218, G219, and K220. The 44 single point NNK libraries were generated using Kunkel mutagenesis, and the products were pooled and introduced to yeast via electroporation, as described above for other yeast libraries.

[0484] The combination of these mini-libraries (each of which had one position mutated, resulting in 20 variants) generated a small library that was selected using yeast surface display for any positions that lead to higher affinity binding. Selections were performed as described above, using TfR apical domain proteins (FIG. 17). After three rounds of sorting, clones from the enriched yeast library were sequenced, and several “hot-spot” positions were identified where certain point mutations significantly improved the binding to apical domain proteins. For CH3C.35, these mutations included E153 (mutated to Trp, Tyr, Leu, or Gln) and 5188 (mutated to Glu). The sequences of the CH3C.35 single and combination mutants are set forth in SEQ ID NOS:21-23, 39-44, and 100-102. For CH3C.18, these mutations included E153 (mutated to Trp, Tyr, or Leu) and K165 (mutated to Gln, Phe, or His). The sequences of the CH3C.18 single mutants are set forth in SEQ ID NOS:45-50.

[0485] The “NNK patch” approach was similar to that described above for the CH3B library, but with patches directly adjacent to the CH3C register. Clone CH3C.35 was used as a starting point and the following libraries were generated:
[0486] CH3C-patchl: amino acid positions: K21, R28, Y164, K165, and T166;
[0487] CH3C-patch2: amino acid positions: Q115, R117, E118, Q120, and K143;
[0488] CH3C-patch3: amino acid positions: T132, K133, N134, Q135, and 5137;
[0489] CH3C-patch4: amino acid positions: E153, E155, 5156, and G158;
[0490] CH3C-patch5: amino acid positions: D172, S173, D174, S176, and K182;
[0491] CH3C-patch6: amino acid positions: L183, T184, V185, K187, and S188;
[0492] CH3C-patch7: amino acid positions: Q191, Q192, G193, V195, and F196;
[0493] CH3C-patch8: amino acid positions: S197, S199, Q211, S213, and S215; and
[0494] CH3C-patch9: amino acid positions: L216, S217, P218, G219, and K220.

[0495] Selections were performed as described above, using TfR apical domain proteins. However, no clones with enhanced binding were identified.

### Additional Maturation Libraries to Improve CH3C.35 Affinity

[0496] An additional library to identify combinations of mutations from the NNK walk library, while adding several additional positions on the periphery of these, was generated as described for previous yeast libraries. In this library, the YxTEWSS and TxxExxxxF motifs were kept constant, and six positions were completely randomized: E153, K165, K187, 5188, S197, and S199. Positions E153 and S188 were included because they were “hot spots” in the NNK walk library. Positions K165, S197, and S199 were included because they make up part of the core that may position the binding region, while K187 was selected due to its adjacency to position 188.

[0497] This library was sorted, as previously described, with the cyno TfR apical domain only. The enriched pool was sequenced after five rounds, and the sequences of the CH3 regions of the identified unique clones are set forth in SEQ ID NOS:51-68.

Exploration of Acceptable Diversity within the Original Register and Hot Spots for CH3C.35.21

[0498] The next libraries were designed to explore the totality of acceptable diversity in the main binding paratope. The approach taken was similar to the NNK walk libraries. Each of the original register positions (157, 159, 160, 161, 162, 163, 186, 189, and 194) plus the two hot spots (153 and 188) were individually randomized with NNK codons to generate a series of single-position saturation mutagenesis libraries on yeast. In addition, each position was individually reverted to the wild-type residue, and these individual clones were displayed on yeast. FIG. 18 shows binding of the parental clone CH3C.35.21 as compared to the wild-type reversions and single-position NNK libraries. It was noted that positions 153, 162, 163, and 188 were the only positions that retained substantial binding to TfR upon reversion to the wild-type residue (some residual but greatly diminished binding was observed for reversion of 186 to wild-type).

[0499] The single-position NNK libraries were sorted for three rounds against the human TfR apical domain to collect the top ˜5% of binders, and then at least 16 clones were sequenced from each library. The results indicate what amino acids at each position can be tolerated without significantly reducing binding to human TfR, in the context of the CH3C.35 clone. A summary is below:
[0500] Position 153: Trp, Leu, or Glu;
[0501] Position 157: Tyr or Phe;
[0502] Position 159: Thr only;
[0503] Position 160: Glu only;
[0504] Position 161: Trp only;
[0505] Position 162: Ser, Ala, or Val (note that although the wild type Asn residue seems to retain some binding, it did not appear following library sorting);
[0506] Position 163: Ser or Asn;
[0507] Position 186: Thr or Ser;
[0508] Position 188: Glu or Ser;
[0509] Position 189: Glu only; and
[0510] Position 194: Phe only.

[0511] The above residues, when substituted into clone CH3C.35 as single changes or in combinations, represent paratope diversity that retains binding to TfR apical domain. Clones having mutations at these positions are shown in Table 4, and the sequences of the CH3 domains of these clones are set forth in SEQ ID NOS:40-44, 67, and 69-99.

### Monovalent Polypeptide-Fab Fusions

[0512] Generation of Monovalent TfR-Binding Polypeptide Fab Fusions

[0513] Although Fc domains naturally form homodimers, a series of asymmetric mutations known as “knobs-in-holes” can lead to preferential heterodimerization of two Fc fragments, where one Fc unit has the T139W knob mutation (which corresponds to position 366 using EU numbering scheme) and the other Fc unit has the T139S, L141A, and Y180V hole mutations (positions 366, 368, and 407, respectively using EU numbering scheme). In some embodiments, a modified CH3 domain of the invention comprises a Trp at position 139. In some embodiments, a modified CH3 domain of the invention comprises a Ser at position 139, an Ala at position 141 and a Val at position 180. Heterodimeric TfR-binding polypeptides were expressed in 293 or CHO cells by transient co-transfection of two plasmids (i.e., a knob-Fc and a hole-Fc), while polypeptide-Fab fusions were expressed by transient co-transfection of three plasmids (i.e., a knob-Fc-Fab heavy chain, a hole-Fc-Fab heavy chain, and a common light chain). Purification of secreted heterodimeric polypeptides or polypeptide-Fab fusions was performed identically to that for homodimers (i.e., a two-column purification using Protein A followed by size-exclusion, and then concentration and buffer exchange if required). Mass-spectrometry or hydrophobic interaction chromatography was used to determine the amount of heterodimer versus homodimer (e.g., knob-knob or hole-hole paired Fe's) formed. From typical preps, greater than 95% of polypeptides, and often greater than 98%, were heterodimers. For clarity, all monovalent TfR binders (Fc homodimers) generated in this fashion were named “ZZ.mono” where ZZ was the name of the polypeptide and “.mono” indicated monovalent TfR binding. For heterodimeric polypeptides and polypeptide-Fab fusions, the mutations that conferred TfR binding included the “knob” mutation, whereas a non-TfR-binding Fc region was used with the “hole” region, unless otherwise indicated. In some cases, additional mutations that alter Fc properties were also included in these constructs, such as L7A/L8A, M25Y/S27T/T29E, N207S, or N207S/M201L for modified FcyR or FcRn binding, respectively.

[0514] Binding Characterization of CH3C.mono Fc Polypeptides

[0515] Binding of monovalent CH3C polypeptides was measured in an ELISA using a modification of the procedure described above. Streptavidin was coated on 96-well ELISA plates overnight at 1 μg/mL in PBS. After washing, the plates were blocked with 1% BSA in PBS, then biotinylated human or cyno TfR was added at 1 μg/mL and incubated for 30 minutes. After additional washing, polypeptides were added to the plates at serial dilutions, and incubated for 1 hour. The plates were washed and secondary antibody (i.e., anti-kappa-HRP, 1:5,000) was added for 30 minutes and the plates were washed again. The plates were developed with TMB substrate and quenched with 2N H₂SO₄ and then absorbance at 450 nm was read on a ^{BioTek}® plate reader. Results are shown in FIG. 19, which directly compares standard (i.e., bivalent TfR-binding) and monovalent TfR-binding polypeptides. Ab204 is a high affinity anti-TfR control antibody.

[0516] Additional testing was performed for binding to 293F cells, which endogenously express human TfR, as well as CHO-K1 cells that were stably transfected with human TfR or cyno TfR (FIG. 20).

[0517] In general, substantially reduced binding to human TfR for monovalent polypeptides was observed as compared to bivalent polypeptides, and cyno binding was too weak to be detected in these assays for the monovalent polypeptides.

[0518] Next it was tested whether monovalent versions of CH3C polypeptides could internalize in human-TfR expressing HEK293 cells. Methods described above for internalization assays were used. As shown in FIG. 21, which compares bivalent and monovalent polypeptides, the monovalent peptides could also internalize, but the overall signal was weaker than for the respective bivalent versions, presumably due to the loss of binding affinity/avidity.

[0519] Kinetics of Binding for CH3C Polypeptides Measured by Biolayer Inferometry

[0520] Binding kinetics were determined for several monovalent and bivalent CH3C polypeptide variants, fused to anti-BACE1 Fabs, and compared to their bivalent equivalents using biolayer inferometry (i.e., using an Octet® RED system). TfR was captured on a streptavidin sensor, then CH3C polypeptides were bound and washed off. Sensograms were fitted to a 1:1 binding model; the KD (app) value for bivalent polypeptides represented avid binding to the TfR dimer. The results are shown in Table 5 and FIGS. 22 and 23.

TABLE 5
Kinetics for CH3C polypeptides using Octet ® Red

| | K_{D} (app) (nM) | K_{D} (app) (nM) |
|---|---|---|
| Polypeptide | [human TfR] | [cyno TfR] |
| CH3C.35.N163 | 67 | 374 |
| CH3C.35.N163.mono | 251 | n.d. |
| CH3C.35 | 59 | 934 |
| CH3C.35.mono | 483 | n.d. |
| CH3C.3.2-1 | 337 | 367 |
| CH3C.3.2-5 | 270 | 385 |
| CH3C.3.2-19 | 367 | 454 |

n.d. = not determined due to too low binding signal

[0521] The polypeptides that were converted to monovalent format had significantly weaker K_{D} (app) values, due to loss of avidity. Clones CH3C.3.2-1, CH3C.3.2-5, and CH3C.3.2-19, which were previously shown to have similar human and cyno TfR binding by ELISA, also had very similar K_{D} (app) values between human and cyno TfR. An attempt was made to test the monovalent forms of these polypeptides, but the binding in this assay was too weak to calculate kinetic parameters.

### Example 3

### Binding Characterization of Additional CH3C Variants Using Biacore™

[0522] The affinity of clone variants for recombinant TfR apical domain was determined by surface plasmon resonance using a Biacore™ T200 instrument. Biacore™ Series S CM5 sensor chips were immobilized with anti-human Fab (human Fab capture kit from GE Healthcare). 5 μg/mL of polypeptide-Fab fusion was captured for 1 minute on each flow cell and serial 3-fold dilutions of human or cyno apical domain were injected at a flow rate of 30 μL/min at room temperature. Each sample was analyzed with a 45-second association and a 3-minute dissociation. After each injection, the chip was regenerated using 10 mM glycine-HCl (pH 2.1). Binding response was corrected by subtracting the RU from a flow cell capturing an irrelevant IgG at similar density. Steady-state affinities were obtained by fitting the response at equilibrium against the concentration using Biacore™ T200 Evaluation Software v3.1.

[0523] To determine the affinity of clone variants for recombinant TfR ectodomain (ECD), Biacore™ Series S CMS sensor chips were immobilized with streptavidin. Biotinylated human or cyno TfR ECD was captured for 1 minute on each flow cell and serial 3-fold dilutions of clone variants were injected at a flow rate of 30 μL/min at room temperature. Each sample was analyzed with a 45-second association and a 3-minute dissociation. The binding response was corrected by subtracting the RU from a flow cell without TfR ECD at a similar density. Steady-state affinities were obtained by fitting the response at equilibrium against the concentration using Biacore™ T200 Evaluation Software v3.1.

[0524] The binding affinities are summarized in Table 6. Affinities were obtained by steady-state fitting.

TABLE 6
Binding affinities for additional CH3C variants

| | Human | Cyno | Human | Cyno |
|---|---|---|---|---|
| | TfR | TfR | apical | apical |
| Clone | (μM) | (μM) | TfR (μM) | TfR (μM) |
| CH3C.35.19.mono | 0.4 | 5.9 | 0.37 | 5.6 |
| CH3C.35.20.mono | 0.25 | 6.7 | 0.17 | 8 |
| CH3C.35.21.mono | 0.1 | 2.1 | 0.12 | 2.2 |
| CH3C.35.24.mono | 0.29 | 3.3 | 0.23 | 3 |
| CH3C.35.21.11.mono | 0.24 | 4 | 0.13 | 2.2 |
| CH3C.35.21.16.mono | 0.18 | 1.8 | 0.12 | 1.9 |
| CH3C.35.21.17.mono | 0.3 | 2.9 | 0.13 | 2.6 |
| CH3C.35.mono | 0.61 | >10 | 0.61 | >10 |
| CH3C.35.N153.mono | 0.42 | >10 | 0.95 | >10 |
| CH3C.35.bi | 0.22 | >2 | not tested | not tested |
| CH3C.35.N153.bi | 0.37 | 3.3 | not tested | not tested |
| CH3C.3.2-19.bi | 5.2 | 5.6 | not tested | not tested |
| CH3C.35.19.bi | 0.074 | 1.5 | not tested | not tested |
| CH3C.35.20.bi | 0.054 | 1.7 | not tested | not tested |
| CH3C.35.21.bi | 0.049 | 0.7 | not tested | not tested |
| CH3C.35.24.bi | 0.061 | 0.65 | not tested | not tested |

[0525] Additional CH3C variants CH3C.35.20.1.1, CH3C.35.23.2.1, CH3C.35.23.1.1, CH3C.35.5413, CH3C.35.23.3.1, CH3C.35.N390.1, and CH3C.35.23.6.1 were created and their binding affinities to human TfR were measured following the same protocol as previously described. The binding affinities of CH3C.35.20.1.1, CH3C.35.23.2.1, CH3C.35.23.1.1, CH3C.35.S413, CH3C.35.23.3.1, CH3C.35.N390.1, and CH3C.35.23.6.1 are 620 nM, 690 nM, 750 nM, 1700 nM, 1900 nM, 2000 nM, and 2100 nM, respectively.

### Example 4

### Binding Characterization of CH3C Variants to FcRn

[0526] FcRn binding assays were performed using a FortéBio® Octet® RED384 instrument using FortéBio® Streptavidin biosensors. Biotinylated recombinant BACE1 was diluted to a concentration of 10 μg/mL in kinetic buffer (obtained from FortéBio®) and captured onto individual biosensors for 1 minute. A baseline was then established for 1 minute in kinetic buffer. 10 μg/mL of the polypeptide-Fab fusions (comprising anti-BACE1 Fab arms) were bound to the sensor tips in the presence or absence of 1 uM human TfR ECD. Recombinant human FcRn (pH5.5) binding to immobilized polypeptide-Fab fusion was analyzed with a 3-minute association and a 3-minute dissociation.

[0527] The sensograms obtained from these experiments (FIG. 24), indicate that polypeptide-Fab fusions variants bound to FcRn at acidic pH (pH 5.5) and that TfR binding did not appreciably interfere with FcRn binding.

### Example 5

### Pharmacokinetic/Pharmacodynamic Characterization of CH3C Variants

[0528] This example describes pharmacokinetic/pharmacodynamic (PK/PD) characterization of CH3C variant polypeptides of the present invention in mouse plasma and brain tissue.

### Pharmacokinetics of CH3C Variants in Wild-Type Mouse Plasma

[0529] Pharmacokinetics (PK) were tested for several CH3C variants in wild-type mice to demonstrate in vivo stability in a model lacking TfR-mediated clearance, as the polypeptide-Fab fusions bind only human TfR and not murine TfR. The study design is shown in Table 7 below. 6-8 week-old C57B16 mice were intravenously dosed and in-life bleeds were taken via submandibular-bleeds, at time points as indicated in Table 7. Blood was collected in EDTA plasma tubes, spun at 14,000 rpm for 5 minutes, and then plasma was isolated for subsequent analysis.

TABLE 7
PK study design

| Group | Polypeptide | Time points | N | Dose (IV) |
|---|---|---|---|---|
| 1A/1B | Ab122 | A = 30 min, 24 h, 4 d | A = 2 | 12.3 mg/kg |
| | | B = 4 h, 2 d, 7 d | B = 3 | |
| 2A/2B | Ab153 | A = 30 min, 24 h, 4 d | A = 2 | 11.4 mg/kg |
| | | B = 4 h, 2 d, 7 d | B = 3 | |
| 3A/3B | CH3C.35.163 | A = 30 min, 24 h, 4 d | A = 2 | |
| | mono (Ab153 | B = 4 h, 2 d, 7 d | B = 3 | 11.4 mg/kg |
| | fusion) | | | |
| 4A/4B | CH3C.3.2-19 | A = 30 min, 24 h, 4 d | A = 2 | 11.0 mg/kg |
| | (Ab153 fusion) | B = 4 h, 2 d, 7 d | B = 3 | |
| 5A/5B | CH3C.3.2-5 | A = 30 min, 24 h, 4 d | A = 2 | 10.5 mg/kg |
| | (Ab153 fusion) | B = 4 h, 2 d, 7 d | B = 3 | |
| 6A/6B | CH3C.3.2-1 | A = 30 min, 24 h, 4 d | A = 2 | 10.0 mg/kg |
| | (Ab153 fusion) | B = 4 h, 2 d, 7 d | B = 3 | |

[0530] Ab122 served as an anti-RSV control that has normal PK in mice. Ab153 served as an anti-BACE1 control that has normal PK in mice. The Fab arms of Ab153 were fused to the polypeptides in this study.

[0531] Polypeptide concentrations in mouse plasma were quantified using a generic human IgG assay (MSD® human IgG kit #K150JLD-4) following the manufacturer's instructions. Briefly, precoated plates were blocked for 30 minutes with MSD® Blocker A. Plasma samples were diluted 1:2,500 using a Hamilton® NIMBUS liquid handler and added in duplicate to the blocked plates. Dosing solutions were also analyzed on the same plate to confirm the correct dosage. The standard curve, 0.78-200 ng/mL IgG, was fit using a four-parameter logistic regression. FIG. 25 and Table 8 show the analysis of these data. All of the CH3C polypeptide variants had clearance and half-life values comparable to the standard Ab122, except for CH3C.3.2-5, which had substantially faster clearance and a shorter half-life. Interestingly, this variant was a point mutant of CH3C.3.2-19 (N163D), the latter of which had a normal PK profile.

TABLE 8
PK parameters for CH3C polypeptide-Fab fusions

| | Clearance | Half-life |
|---|---|---|
| Polypeptide | (mg/day/kg) | (days) |
| Ab122 | 6.12 | 9.12 |
| Ab153 | 9.11 | 4.74 |
| CH3C.35.N163 mono (Ab153 fusion) | 8.44 | 5.35 |
| CH3C.3.2-19 (Ab153 fusion) | 10.3 | 5.42 |
| CH3C.3.2-5 (Ab153 fusion | 21.0 | 1.90 |
| CH3C.3.2-1 (Ab153 fusion) | 9.25 | 4.65 |

### Additional PK Study in Wild-Type Mouse

[0532] A second PK study was conducted in wild-type mice according to the study design in Table 9 below (all polypeptide-Fab fusions to Ab153 Fab):

TABLE 9

| Polypeptide | Dose (mg/kg) | Timepoint | n/group |
|---|---|---|---|
| Ab153 | 10 | 0.5 h, 1 d, 4 d, 7 d | 3 |
| CH3C.35.21.mono | 10 | 0.5 h, 1 d, 4 d, 7 d | 3 |
| CH3C.35.24.mono | 10 | 0.5 h, 1 d, 4 d, 7 d | 3 |
| CH3C.35.21.16.mono | 10 | 0.5 h, 1 d, 4 d, 7 d | 3 |
| CH3C.35.21.17.mono | 10 | 0.5 h, 1 d, 4 d, 7 d | 3 |
| CH3C.35.20.bi | 10 | 0.5 h, 1 d, 4 d, 7 d | 3 |
| CH3C.35.21.bi | 10 | 0.5 h, 1 d, 4 d, 7 d | 3 |

[0533] Mice and samples were processed as described in the previous study. Data is provided in Table 10.

TABLE 10
Clearance values for CH3C.35 polypeptide-Fab fusions

| Test polypeptide | Clearance (mL/day/kg) |
|---|---|
| Ab153 | 9.53 |
| CH3C.35.21.mono | 8.99 |
| CH3C.35.24.mono | 9.00 |
| CH3C.35.21.16.mono | 11.6 |
| CH3C.35.21.17.mono | 10.9 |
| CH3C.35.20.bi | 7.13 |
| CH3C.35.21.bi | 11.6 |

[0534] As is apparent from the clearance values, these polypeptide-Fab fusions exhibited similar clearance in wild-type mice as compared with a standard control antibody.

### PK/PD Evaluation of Monovalent CH3C.35.N163 in Wild-Type Mouse Brain Tissue

[0535] Transgenic mice expressing human Tfrc apical domain within the murine Tfrc gene were generated using CRISPR/Cas9 technology. The resulting chimeric TfR was expressed in vivo under the control of the endogenous promoter.

[0536] Chimeric huTfR^{apical} heterozygous mice (n=4/group) were intravenously dosed with 42 mg/kg of either Ab153 or monovalent CH3C.35.N163, and wild-type mice (n=3) were dosed intravenously with 50 mg/kg of control human IgG1. Ab153 served as a control that has normal PK in mice. All mice were perfused with PBS 24 hours post-dose. Prior to perfusion, blood was collected in EDTA plasma tubes via cardiac puncture and spun at 14,000 rpm for 5 minutes. Plasma was then isolated for subsequent PK and PD analysis. Brains were extracted after perfusion and hemi-brains were isolated for homogenization in 10× by tissue weight of 1% NP-40 in PBS (for PK) or 5 M GuHCl (for PD).

[0537] FIG. 26 shows the results of the brain PK study. Uptake was greater in the monovalent CH3C.35.N163 group than the Ab153 and control human IgG1 groups.

Brain and Plasma PKPD of Polypeptide-Fab Fusions in hTfR^{apical+/+} Mice: CH3C.35.21 and CH3C.35.N153

[0538] Homozygous hTfR^{apical+/+} mice were intravenously injected with 50 mg/kg of either anti-BACE1 antibody Ab 153, anti-TfR/BACE1 bispecific antibody Ab 116, CH3C.35.21.mono fused to Ab153 Fab, or CH3C.35.N153.bi fused to Ab153 Fab, as indicated in the study design in Table 11. In this study, all Fc's had LALAPG mutations to remove effector functions.

TABLE 11
Study design for single point brain and plasma PKPD study

| | hTfR affinity | Dose | Timepoint | |
|---|---|---|---|---|
| Polypeptide | (nM) | (mg/kg) | (day) | n/group |
| Ab153 | n/a | 50 | 1 | 8 |
| Ab116 | 330 | 50 | 1 | 8 |
| CH3C.35.21.mono | 160 | 50 | 1 | 8 |
| CH3C.35.N153.bi | 370 | 50 | 1 | 8 |

[0539] After 24 hours, blood was collected via cardiac puncture and the mice were perfused with PBS. Brain tissue was homogenized in 10× tissue weight of lysis buffer containing 1% NP-40 in PBS. Blood was collected in EDTA tubes to prevent clotting and spun at 14,000 rpm for 7 minutes to isolate plasma. Polypeptide concentrations in mouse plasma and brain lysates were quantified using a generic human IgG assay (MSD human IgG kit #K150JLD) following the manufacturer's instructions. Briefly, pre-coated plates were blocked for 30 minutes with MSD Blocker A. Plasma samples were diluted 1:10,000 using a Hamilton Nimbus liquid handler and added in duplicate to the blocked plates. Brain samples were homogenized in 1% NP40 lysis buffer and lysates diluted 1:10 for PK analysis. Dosing solutions were also analyzed on the same plate to confirm the correct dosage. The standard curve, 0.78-200 ng/mL IgG, was fit using a four-parameter logistic regression.

[0540] After 24 hours, the plasma levels of TfR-binding polypeptides were lower than the levels for anti-BACE1, likely due to clearance of this antibody via binding to peripherally-expressed hTfR^{apical} (FIG. 27A). In brain, there was a signficant increase in the concentration of anti-TfR/BACE1 compared to anti-BACE1 (FIG. 27B). The greatest increase was observed for CH3C.35.21.mono, but brain uptake was also significantly improved as compared to anti-BACE with CH3C35.N153.bi. The significant accumulation of the engineered TfR-binding polypeptides was due to TfR-mediated transcytosis at the blood-brain barrier, thus validating the utility of engineering TfR binding into the Fc region.

[0541] BACE1 inhibition of amyloid precursor protein APP cleavage was used as a pharmacodynamic readout of antibody activity in plasma and brain. Brain tissue was homogenized in 10× tissue weight of 5 M guanidine-HCl and then diluted 1:10 in 0.25% casein buffer in PBS. Mouse A1340 levels in plasma and brain lysate were measured using a sandwich ELISA. A 384-well MaxiSorp plate was coated overnight with a polyclonal capture antibody specific for the C-terminus of the Aβ40 peptide (Millipore #ABN240). Casein-diluted guanidine brain lysates were further diluted 1:2 on the ELISA plate and added concurrently with the detection antibody, biotinylated M3.2. Plasma was analyzed at a 1:5 dilution. Samples were incubated overnight at 4° C. prior to addition of streptavidin-HRP followed by TMB substrate. The standard curve, 0.78-50 pg/mL msAβ40, was fit using a four-parameter logistic regression.

[0542] Plasma amyloid beta-protein (Abeta) was reduced to a similar extent for all polypeptides, as compared to untreated wild-type mice (FIG. 28A), due to the presence of anti-BACE1 Fab arms on all polypeptides. Compared to anti-BACE1, treatment with TfR-binding polypeptides resulted in an increased reduction of Abeta in hTfR^{apical+/+} mice, indicating BACE1 target engagement in the brain was achieved (FIG. 28B). The level of target engagement in brain was similar for the engineering polypeptide fusions and the anti-TfR/BACE1 bispecific antibody.

Brain and Plasma PKPD of Polypeptide-Fab Fusions in hTfR^{apical+/+} mice: CH3C.35.21, CH3C.35.20, CH3C.35, CH3C.35.23, CH3C.35.23.3

[0543] To evaluate the impact of TfR binding affinity for PK and brain uptake, anti-BACE1 Ab153 and TfR-binding polypeptide fusions (CH3C.35.21:Ab153, CH3C.35.20:Ab153, CH3C.35:Ab153 fusions) were generated that differed in their binding affinity to apical human TfR as measured by Biacore. The binding affinities of CH3C.35.21:Ab153, CH3C.35.20:Ab153, CH3C.35:Ab153 fusions to human TfR are 100 nM, 170 nM and 620 nM, respectively. hTfR^{apical+/+} knock-in mice were systemically administered either Ab153 or the polypeptide-Fab fusions at 50 mg/kg, and plasma PK and brain PKPD was evaluated at 1, 3, and 7 days post-dose. Brain and plasma PKPD analysis was conducted as described in the previous section. Due to expression of TfR on peripheral tissues, CH3C.35.21:Ab153, CH3C.35.20:Ab153, and CH3C.35:Ab153 fusions exhibited faster clearance in plasma as compared to Ab153 alone, consistent with target-mediated clearance and indicative of in vivo TfR binding (FIG. 39A). Impressively, brain concentrations of CH3C.35.21:Ab153, CH3C.35.20:Ab153, and CH3C.35:Ab153 fusions were significantly increased compared to Ab153, achieving a maximum brain concentration of more than 30 nM at 1 day post-dose, compared to only about 3 nM for Ab153 at this same time point (FIG. 39B). The increase in brain exposure of CH3C.35.21:Ab153, CH3C.35.20:Ab153, and CH3C.35:Ab153 fusions resulted in about 55-60% lower endogenous mouse Aβ levels in brains of mice compared to Aβ levels in mice dosed with Ab153 (FIG. 39C). The lower brain Aβ levels were sustained while concentrations of CH3C.35.21:Ab153, CH3C.35.20:Ab153, and CH3C.35:Ab153 fusions remained elevated in brain, and returned to levels similar to Ab153 treated mice at when exposure was reduced by day 7. The reduction in brain exposure over time correlated with a reduction in peripheral exposure of CH3C.35.21:Ab153, CH3C.35.20:Ab153, and CH3C.35:Ab153 fusions, providing a clear PK/PD relationship in vivo (compare FIGS. 39A and 39C). Additionally, total brain TfR levels were comparable for Ab153-treated and polypeptide-Fab fusion-treated mice after this single high dose, indicating no significant impact of increased brain exposure of the polypeptide-Fab fusions to TfR expression in brain (FIG. 39D).

[0544] To further evaluate the relationship between PK and brain uptake with a wider affinity range of TfR-binding polypeptide-Fab fusions, additional fusions with a wider affinity range for hTfR binding was generated. The binding affinities of CH3C.35.23:Ab153 and CH3C.35.23.3:Ab153 fusions to human TfR are 420 nM and 1440 nM, respectively. hTfRapicar^{+/+} knock-in mice were dosed as described above. Plasma PK and brain PKPD were evaluated at 1, 4, 7, and 10 days post-dose. Peripheral PK of the polypeptide-Fab fusions were hTfR affinity-dependent, where the higher affinity CH3C.35.23:Ab153 fusion exhibited faster clearance compared to the much lower affinity CH3C.35.23.3:Ab153 fusion (FIG. 40A). Both CH3C.35.23:Ab153 and CH3C.35.23.3:Ab153 fusions had significantly greater brain exposure than compared to Ab153 alone, with CH3C.35.23:Ab153 achieving about 36 nM in brain at 1 day post-dose (FIG. 40B). Despite similar plasma concentrations, this maximum brain uptake of CH3C.35.23.3:Ab153 fusion was lower than that of CH3.35.23:Ab153 fusion, likely due to the about 3.5-fold lower affinity of the latter fusion for hTfR. Interestingly, because the lower affinity fusion provided a more sustained peripheral exposure by day 10, its brain exposure was also higher than that of the higher affinity CH3C.35.23:Ab153 fusion. This illustrates a trade-off of lower brain Cₘₐₓ but more sustained PK over time for lower affinity TfR-binding polypeptide-Fab Fusions. Significantly lower concentrations of Aβ40 was observed in brains of mice dosed with the anti-BACE1 polypeptide fusions compared to anti-BACE1 alone (FIG. 40C). This duration of Aβ40 reduction was consistent with levels of huIgG1 exposure in brain over time (FIG. 40B). Impressively, mice dosed with CH3C.35:Ab153 fusion exhibited a prolonged brain Aβ40 reduction out to 7-10 days after a single dose. Total brain TfR levels were comparable between mice dosed with Ab153 versus CH3C.35:Ab153 fusion at 1 day post-dose (FIG. 40D). Together these data demonstrate that TfR-binding polypeptide fusion can increase brain exposure of anti-BACE1 to significantly reduce brain Aβ40 after a single dose.

### Example 6

### CH3C.18 Fc and Transferrin Receptor Apical Domain Crystallization

[0545] This example describes the crystallization and analysis of the binding interface between CH3C.18 and the apical domain of the transferrin receptor (TfR-AD).

### Expression

[0546] The apical domain of human transferrin receptor (TfR-AD) and an engineered human Fc (CH3C.18 Fc) were expressed (SEQ ID NOS:104 and 105, respectively) in Expi293 cells at the initial cell density of 2.5×10⁶ cells/mL. Expressions were performed in volumes of 200 mL or more, as necessary. Kifunensine, a glycosylation inhibitor, was added 20 hours post transfection at a final concentration of 25 μM. Expression cultures were collected 3 to 4 days post transfection, when cell viability had significantly decreased.

### Purification

[0547] Expressed TfR-AD and CH3C.18 Fc were purified with protein A and Ni-NTA resins, respectively, followed by size-exclusion chromatography on a Superdex200 26/60 gel filtration column. The following buffers were used:
[0548] Protein A wash buffer: 20 mM Hepes pH 7.4, 100 mM NaCl;
[0549] Protein A elution buffer: 30 mM glycine pH 2.5 (the eluate was collected into a tube containing 1M Tris, pH 9.0 to immediately neutralize the eluate);
[0550] Ni-NTA wash buffer: 30 mM Tris pH 8.0, 10 mM imidazole, and 200 mM NaCl;
[0551] Ni-NTA elution buffer: 30 mM Tris pH 8.0, 200 mM NaCl, and 250 mM imidazole; and
[0552] Size-exclusion buffer (SEC): 30 mM HEPES pH 7.5, 200 mM NaCl, and 3% glycerol.

### Complex Formation and Purification

[0553] Purified TfR-AD and CH3C.18 Fc were mixed with an excess of apical domain, incubated at room temperature for 1 hour, and the complex was purified using size-exclusion chromatography on a Superdex200 26/60 gel-filtration column using the previously mentioned SEC buffer. The sizing gave two major peaks as expected; one corresponded to the complex (retention volume=180 ml) and the other one corresponded to the excess apical domain (retention volume=240 ml). The peak fractions were analyzed by Coomassie stained SDS-PAGE gel (FIG. 29).

### Crystallization

[0554] Initial crystallization screening of the complex was performed by the sitting drop vapor diffusion method at 15° C. and room temperature (RT) at 8.5 mg/mlL protein concentration. Showers of thin needles of crystals were observed in the condition that contained 25% PEG 3350, 0.1M Tris pH 8.5 and 0.2M MgCl₂. These crystals were used to seed in the same condition but at 20% PEG 3350 to produce single thin needles of mountable size.

### X-Ray Data Collection

[0555] Crystals were flash-cooled by direct immersion in liquid nitrogen using the crystallization mother liquor supplemented with 20% (v/v) ethylene glycol. X-ray intensity data were collected at the SER-CAT beam line of the Advanced Photon Source (APS) using a Rayonix 300 high speed detector. Crystals were diffracted to 3.6 Å, and belonged to the hexagonal space group P64 with two complex molecules in the asymmetric unit (Table 12). Data were indexed, integrated, and scaled using the program HKL2000. Data collected from two crystals were merged to produce 3.6 Å data.

TABLE 12
Crystal data for CH3C.18 Fc-TfR-AD complex structure

| Name/code | | CH3C.18 Fc-TfR-AD complex |
|---|---|---|
| Cell dimensions | a (Å) | 124.3 |
| | b | 124.3 |
| | c | 113.1 |
| | α (°) | 90.0 |
| | β | 90.0 |
| | γ | 120.0 |
| Space group | | P6₄ |
| Resolution range (Å) | Overall | 50-3.6 |
| | Last shell | 3.71-3.6 |
| Number of unique | | 11,259 |
| reflections | | |
| Completeness (%) | (Overall/Last | 95.9/74.1 |
| | shell) | |
| R_{merge}¹ | (Overall/Last | 20/93 |
| | shell) | |
| Refinement Statistics | Resolution (Å) | 50-3.6 |
| | R factor²/Rfree | 30/39 |
| | (%) | |

¹R_{merge} = Σⱼ(|Iₕ − <I>ₕ|)/ΣIₕ, where <Iₕ> is the average intensity over symmetry equivalents
²R-factor = Σ|F_{obs} − F_{calc}|/Σ|F_{obs}|

### Structure Determination and Refinement

[0556] The crystal structure of the complex was determined by molecular replacement with PHASER using the CH3C.18 Fc dimer and TFR-AD monomer as the initial search models. The model was refined by rigid-body refinement followed by restrained refinement using REFMAC. All crystallographic calculations were performed with the CCP4 suite of programs (www.ccp4.ac.uk/). Model building of the complex into the electron density was done using the graphics program COOT. The electron density for the complex molecule was good, especially at the CH3C.18 Fc-TfF-AD interface (2Fo-Fc map contoured to 1.2 sigma level). After iterative model building and refinement, high R and freeR (R/freeR=0.30/0.39) were noticed due to the low resolution of the data and disordered CH2 domain. The disorder of the CH2, as found in other available Fc structures, was due to the flexible elbow angle between the CH2 and CH3 domains.

### Binding Interface Interactions

[0557] The binding interface between CH3C.18 Fc and TfR-AD is depicted in FIGS. 30A-30B and FIGS. 31A-31B. As shown in FIGS. 32A-32B, interactions were observed between:

[0558] Trp154 of CH3C.18 and Arg208 of TfR-AD;

[0559] Glu155 of CH3C.18 and Arg208 of TfR-AD;

[0560] Ser156 of CH3C.18 and Arg208 and Leu212 of TfR-AD;

[0561] Leu157 of CH3C.18 and Ser 199 and Asn215 of TfR-AD;

[0562] His159 of CH3C.18 and Lys188, Ser199, and Arg208 of TfR-AD;

[0563] Val160 of CH3C.18 and Gly207 and Arg208 of TfR-AD;

[0564] Trp161 of CH3C.18 and Arg208, Val210, and Leu212 of TfR-AD;

[0565] Ala162 of CH3C.18 and Arg208 of TfR-AD;

[0566] Val163 of CH3C.18 and Leu209 of TfR-AD;

[0567] Ser188 of CH3C.18 and Tyr211 of TfR-AD;

[0568] Thr189 of CH3C.18 and Tyr211 and Leu212 of TfR-AD;

[0569] Gln192 of CH3C.18 and Lys158 and Glu294 of TfR-AD;

[0570] Trp194 of CH3C.18 and Leu212, Val213, Glu214, and Asn215 of TfR-AD; and

[0571] Phe196 of CH3C.18 and Arg208 of TfR-AD.

[0572] Furthermore, as described in the section titled “Paratope Mapping” of Example 2 and as shown in FIGS. 32A-32B, several positions outside of the CH3C register also participate in binding to TfR.

### Example 7

### CH3C.35 Fc and Transferrin Receptor Apical Domain Crystallization

[0573] This example describes the crystallization and analysis of the binding interface between CH3C.35 and the apical domain of the transferrin receptor (TfR-AD).

### Expression

[0574] The apical domain of human transferrin receptor (TfR-AD) and an engineered human Fc (CH3C.35 Fc) were expressed (SEQ ID NOS:104 and 181, respectively) in CHO cells at an initial cell density of 2.5×10⁶ cells/mL. Expressions were performed in volumes of 500 mL or more, as necessary. Expression cultures were collected 3 to 4 days post transfection, when cell viability had significantly decreased.

### Purification

[0575] Expressed TfR-AD and CH3C.35 Fc were purified with protein A (Genescript) and Ni-NTA (Sigma) resins, respectively, followed by size-exclusion chromatography on a Superdex200 26/60 gel filtration column. The following buffers were used:

[0576] Protein A elution buffer: 30 mM glycine pH 2.5 (the eluate was collected into a tube containing 1 M Tris, pH 9.0 to immediately neutralize the eluate);

[0577] Ni-NTA elution buffer: 30 mM Tris pH 8.0, 200 mM NaCl, and 250 mM imidazole; and

[0578] Size-exclusion buffer (SEC): 30 mM HEPES pH 7.5, 150 mM NaCl, 50 mM KCl, 3% glycerol, and 0.01% sodium azide.

### Complex Formation and Purification

[0579] Purified TfR-AD and CH3C.35 Fc were mixed with an excess of apical domain, incubated at room temperature for 1 hour, and the complex was purified using size-exclusion chromatography on a Superdex200 26/60 gel filtration column using the previously mentioned SEC buffer.

### Crystallization

[0580] Initial crystallization screening of the complex was performed by the sitting drop vapor diffusion method at 4° C., 15° C., and room temperature (RT). Showers of thin needles of crystals were observed in the condition that contained 25% PEG 3350, 0.1 M Bis-Tris pH 6.5, and 0.2 M LiSO₄. These crystals were used to seed in the same condition but at 20% PEG 3350 to produce single thin needles and the seeding was repeated sequentially four times to produce crystals of mountable size.

### X-Ray Data Collection

[0581] Crystals were flash-cooled by direct immersion in liquid nitrogen using the crystallization mother liquor supplemented with 20% (v/v) ethylene glycol. X-ray intensity data were collected at IO4 beam line of the Diamond Light Source (DLS) using PILATUS detector. Micro focus beam of size 5 micron was used for the data collection. Crystals were diffracted to 3.38 Å, and belonged to the hexagonal space group P6₄ with two complex molecules in the asymmetric unit (Table 13). Data were indexed, integrated, and scaled using the CCP4 suite programs (Xia2-XDS and XSCALE).

TABLE 13
Crystal data for CH3C.35 Fc-TfR-AD complex structure

| Name/code | | CH3C.35 Fc-TfR-AD complex |
|---|---|---|
| Cell dimensions | a (Å) | 126.4 |
| | b | 126.4 |
| | c | 113.8 |
| | α (°) | 90.0 |
| | β | 90.0 |
| | γ | 120.0 |
| Space group | | P6₄ |
| Resolution range (Å) | Overall | 50-3.38 |
| | Last shell | 3.44-3.38 |
| Number of unique | | 14,541 |
| reflections | | |
| Completeness (%) | (Overall/Last | 100/99.7 |
| | shell) | |
| R_{merge}¹ | (Overall/Last | 31/152 |
| | shell) | |
| Refinement Statistics | Resolution (Å) | 50-3.38 |
| | R factor²/Rfree | 27/35 |
| | (%) | |

¹R_{merge} = Σⱼ(|Iₕ − <I>ₕ|)/ΣIₕ, where <Iₕ> is the average intensity over symmetry equivalents
²R-factor = Σ|F_{obs} − F_{calc}|/Σ|F_{obs}|

### Structure Determination and Refinement

[0582] The crystal structure of the complex was determined by molecular replacement with PHASER using the CH3C.35 Fc-AD TfR complex as the search model. The model was refined by rigid-body refinement followed by restrained refinement using REFMAC. All crystallographic calculations were performed with the CCP4 suite of programs. Model building of the complex into the electron density was done using the graphics program COOT. The electron density for the complex molecule was good, especially at the CH3C.35 Fc-TfF-AD interface.

### Binding Interface Interactions

[0583] The binding interface between CH3C.35 Fc and TfR-AD is depicted in FIGS. 34A-34C. FIG. 34A shows the complex of CH3C.35 Fc and TfR-AD at 3.4 A. FIG. 34B shows residue W161 in CH3C.35 Fc is stabilized by residues L209, L212, and Y211 in TfR-AD. FIG. 34C shows a salt bridge between residue E160 in CH3C.35 Fc and residue R208 in TfR-AD as a central binding interaction, which may partially account for the difference in binding affinity of the Fc polypeptide to human TfR (Arg at position 208) and to cynomolgus TfR (Gly at position 208). FIG. 35A shows an overlaid structure between the CH3C.35 Fc and TfR-AD complex and the CH3C.18 Fc and TfR-AD complex (described in Example 6), demonstrating that there is no significant Fc backbone conformational change between CH3C.35 and CH3C.18. FIG. 35B shows an enlarged view of the overlaid structure in FIG. 35A. Residues 206-212 in TfR-AD of the CH3C.35 Fc/TfR-AD complex adopted different conformations from the residues in the TfR-AD of the CH3C.18 Fc/TfR-AD complex. Residue R208 in TfR-AD appeared buried in surface of the CH3C.18 Fc/TfR-AD complex, but appeared solvent exposed in the CH3C.35 Fc/TfR-AD complex. Further, residue L209 in TfR-AD of the CH3C.35 Fc/TfR-AD complex appeared rotated 180° and bound to the surface, but appeared away from the surface in the in the CH3C.18 Fc/TfR-AD complex.

[0584] As shown in FIGS. 36A and 36B, interactions were observed between:

[0585] Thr159 of CH3C.35 and Gly207, Arg208, Lys188, and Leu209 of TfR-AD;

[0586] Glu160 of CH3C.35 and Arg208 and Leu209 of TfR-AD;

[0587] Ser162 of CH3C.35 and Arg208 and Leu209 of TfR-AD;

[0588] Ser156 of CH3C.35 and Leu209 of TfR-AD;

[0589] Trp161 of CH3C.35 and Leu209, Tyr211, and Leu212 of TfR-AD;

[0590] Glu189 of CH3C.35 and Tyr211 and Leu212 of TfR-AD;

[0591] Phe194 of CH3C.35 and Leu212, Asn215, and Val213 of TfR-AD;

[0592] Tyr157 of CH3C.35 and Leu212, Asn215, and Ser199 of TfR-AD;

[0593] Gln192 of CH3C.35 and Val213 and Lys158 of TfR-AD; and

[0594] Phe196 of CH3C.35 and Val213 and Leu212 of TfR-AD.

[0595] Furthermore, as described in the section titled “Paratope Mapping” of Example 2 and as shown in FIGS. 36A and 36B, several positions outside of the CH3C register also participate in binding to TfR.

### Example 8

### Pharmacokinetic/Pharmacodynamic Studies of Fc-Fab Fusion Polypeptides Comprising CH3C Variants in Cynomolgus Monkeys

[0596] This example describes pharmacokinetic/pharmacodynamic (PK/PD) characterization of Fc-Fab fusions comprising CH3C variant polypeptides of the present invention in cynomolgus monkeys.

### Study Design

[0597] A single 30 mg/kg dose of Ab122 (an anti-RSV antibody as control IgG), Ab153 (an anti-BACE1 antibody), Ab210 (anti-TfR/BACE1 bispecific antibody), or Fc-Fab fusion polypeptides comprising CH3C variant polypeptides fused to the Fab domain of Ab153 were intravenously administered in male cynomolgus monkeys 2-4 years old to evaluate plasma PK, plasma PD (Aβ40), and cerebrospinal fluid (CSF) PD (Aβ40) over the course of 29 days (n=4/group). To establish baseline, pre-dose CSF and blood samples were taken from each animal 7 days prior to dosing. After dosing, CSF was collected via an IT-L catheter at 12, 24, 48, 72, and 96 hours post-dose, and on study days 8, 11, 15, 18, 22, 25, and 29 for PD analysis. Blood samples were collected for plasma and serum PK at 0.25, 1, 6, 12, 24, 72 hours post-dose, and on study days 8, 11, 15, 18, 22, 25, and 29.

[0598] Table 14 shows an outline of the study design. “CH3C.35.21.16:Ab153” is a monovalent Fc-Fab fusion polypeptide comprising clone CH3C.35.21.16 fused to the Ab153 Fab domain. “CH3C.35.21:Ab153” is a monovalent Fc-Fab fusion polypeptide comprising clone CH3C.35.21 fused to the Ab153 Fab domain. “CH3C.35.9:Ab153” is a bivalent Fc-Fab fusion polypeptide comprising clone CH3C.35.21 fused to the Ab153 Fab domain. “CH3C.35.8:Ab153” is a bivalent Fc-Fab fusion polypeptide comprising clone CH3C.35.20 fused to the Ab153 Fab domain. “LALAPG” indicates that the antibody or Fc-Fab fusion polypeptide contains the mutations L7A, L8A, and P102G in the Fc sequence (as numbered with reference to SEQ ID NO:1). “LALAPG.YTE” indicates that the Fc-Fab fusion polypeptide contains the mutations L7A, L8A, P102G, M25Y, S27T, and T29E in the Fc sequence (as numbered with reference to SEQ ID NO:1).

TABLE 14

| | | Cyno TfR | Cyno TfR | | | |
|---|---|---|---|---|---|---|
| | | full-length | apical | | | |
| | | affinity | affinity | | | Material |
| Treatment | Isotype | (nM) | (nM) | Dose | N | (mg) |
| Ab122 (control IgG) | huIgG1.LALAPG | — | | 30 | 4 | 750 |
| Ab153 | huIgG1.LALAPG | — | | 30 | 4 | 750 |
| Ab210 | huIgG1.LALAPG | 52 | 140 | 30 | 4 | 750 |
| CH3C.35.21.16: Ab153 | huIgG1.LALAPG | 1800 | 1900 | 30 | 4 | 750 |
| (monovalent) | | | | | | |
| CH3C.35.21.16: Ab153 | huIgG1.LALAPG.YTE | 1800 | 1900 | 30 | 4 | 750 |
| (monovalent) | | | | | | |
| CH3C.35.21: Ab153 | huIgG1.LALAPG.YTE | 2100 | 2200 | 30 | 4 | 750 |
| (monovalent) | | | | | | |
| CH3C.35.9: Ab153 | huIgG1.LALAPG.YTE | 700 | | 30 | 4 | 750 |
| (bivalent) | | | | | | |
| CH3C.35.8: Ab153 | huIgG1.LALAPG.YTE | 1700 | | 30 | 4 | 750 |
| (bivalent) | | | | | | |

### Methods

[0599] Human IgG PK Assay

[0600] Antibody or Fc-Fab fusion polypeptide concentrations in cyno serum were quantified using a human IgG-specific sandwich ELISA. A 384-well MaxiSorp plate was coated overnight with an antibody specific for the Fc of human IgG. Serum samples were diluted 1:100, 1:1,000, 1:10,000, and 1:100,000 and added to the blocked plates. The detection antibody was a polyclonal anti-human IgG monkey-absorbed antibody. The standard curves were prepared for each antibody or Fc-Fab fusion polypeptide individually (48-200,000 pg/mL IgG) and the assay has a lower limit of quantification (LLOQ) in serum of 20 ng/mL.

[0601] PD Assays

[0602] Soluble APPα/β levels in cyno CSF were measured using a MesoScale Discovery (MSD) multiplex kit (MSD #K15120E). Two different antibodies specifically captured either sAPPα or sAPPβ, and then both analytes were detected with a SULFO-tag labeled anti-APP mouse monoclonal antibody. Cyno Aβ40 levels were measured using a MSD ultra-sensitive kit (MSD #K151FTE). This assay used the huAβ-specific 6E10 antibody as the capture and an anti-Aβ40 antibody specific for the C-terminus of the peptide as the detection molecule. Both assays were run according to the manufacturer's instructions. Briefly, precoated plates were blocked for 1 hour with MSD Blocker A. CSF samples were diluted 1:5 and added in duplicate to the blocked plates followed by an overnight incubation at 4° C. Next, the respective detection antibodies were added and the plates read on a Sector 5600 instrument. The standard curves, 0.92-3750 pg/mL huAβ40 and 0.1-100 ng/mL for both sAPPα/β, were fit using a four-parameter logistic regression. The assays had a LLOQ of 73 pg/mL for Aβ40 and 0.5 ng/mL for sAPPα/β.

### Results

[0603] Interim serum PK from the first 7 days post-dose showed the expected target-mediated clearance for Ab210 and CH3C.35.9:Ab153 due to their binding to TfR in the periphery (FIG. 37A). Both Ab153 and Ab210 antibodies, as well as CH3C.35.9:Ab153, resulted in a significant and sustained reduction in plasma Aβ40 compared to control IgG (FIG. 37B), confirming all three molecules were able to inhibit BACE1 activity in vivo to a similar extent. In the CSF, both Ab210 and CH3C.35.9:Ab153 were able to reduce CSF Aβ40 and sAPPβ/sAPPα ratio to about 70% and about 75%, respectively, compared to control IgG (FIGS. 38A and 38B). Ab153, an anti-BACE1 antibody that does not bind TfR, showed minimal impact on CSF Aβ40 and sAPPβ/sAPPα ratio compared to control IgG. These results demonstrate that binding to TfR with a CH3C variant polypeptide (e.g., clone CH3C.35.9) enhances CNS penetration of an Fc-Fab fusion comprising the CH3C variant polypeptide fused to the Fab domain of an anti-BACE1 antibody (e.g., CH3C.35.9:Ab153) to inhibit CSF Aβ40 and sAPPβ/sAPPα production.

[0604] Serum PK, plasma Aβ, and CSF Aβ levels were also evaluated for four weeks following a single dose. Similar to what was observed in mouse, peripheral serum PK of TfR-binding Fc-Fab fusions (CH3C.35.21.16:Ab153 LALAPG, CH3C.35.21.16:Ab153 LALAPGYTE, and CH3C.35.21:Ab153 LALAPGYTE) exhibited faster clearance compared to Ab122 and Ab153 due to binding to TfR on peripheral tissues (FIG. 41A). Both Ab153 and CH3C:Ab153 fusion reduced plasma Aβ levels by greater than about 50% compared to control IgG_Ab122 (FIG. 41B). The maximum Aβ was similar between Ab153 and CH3C:Ab153 fusion, indicating that the Fc modifications did not affect ability of anti-BACE1 Fab to inhibit APP cleavage in vivo (FIG. 41B). The duration of plasma Aβ correlated with the exposure of Ab153 and CH3C:Ab153 over time. In the CSF, all three Fc-Fab fusions were able to significantly reduce both Aβ40 and sAPPβ/sAPPα ratio to about 70% compared to control IgG_Ab122, whereas no significant reduction was observed in animals dosed with Ab153 (FIGS. 41C and 41D). These results demonstrate that binding to TfR with a CH3C variant polypeptide (e.g., clone CH3C.35.21.16 and CH3C.35.21) enhances CNS penetration of an Fc-Fab fusion comprising the CH3C variant polypeptide fused to the Fab domain of an anti-BACE1 antibody (e.g., CH3C.35.21.16:Ab153 and CH3C.35.21:Ab153) to inhibit CSF Aβ40 and sAPPβ/sAPPα production.

[0605] Because of the high level of TfR expression on immature red blood cells, peripheral blood clinical pathology was evaluated throughout the course of the study to evaluate reticulocyte number, serum iron, and red blood cell count. The assessment of serum iron levels utilized a variation of the method using TPTZ [2,4,6-Tri-(2-pyridyl)-5-triazine] as the chromogen. In an acidic medium, transferrin-bound iron dissociated into free ferric ions and apo transferrin. Hydrochloric acid and sodium ascorbate reduced the ferric ions to the ferrous state. The ferrous ions then reacted with TPTZ to form a blue colored complex that was measured bichromatically at 600/800 nm. The increase in absorbance was directly proportional to the amount of transferrin bound iron present. This is performed on the Beckman/Olympus AU640e chemistry analyzer. Absolute reticulocytes and RBC morphology were analyzed by the Siemens Advia 120 automated hematology system. Fc-Fab fusions had no impact on reticulocyte number, as compared to their pre-dose values (FIG. 42A). Additionally, serum iron as well as red blood cell number were also not impacted (FIGS. 42B and 42C). Together these data indicate that modified TfR-binding Fc polypeptide-Fab fusions can safely and effectively increase brain exposure of antibodies in non-human primates to produce a robust pharmacodynamic response (i.e., CSF reduction).

### Example 9

### Pharmacokinetic Analysis of CH3C.35 Containing M201L and N207S Mutations

[0606] This example describes that mutations M201L and N2075 are compatible with CH3C.35.

[0607] In order to evaluate whether mutations that increase serum stability, M201L and N207S as numbered with reference to SEQ ID NO: 1 (M428L/N434S according to EU numbering; also referred to as “LS” mutations), are compatible with TfR-binding Fc modifications, human FcRn knock-in mice were dosed with Ab153_LALAPG, Ab153_LALA.LS, CH3C.35.21:Ab_153_LALA.LS, or Ab 153_LALAPG.YTE at 10 mg/kg. Plasma PK evaluation over 14 days showed a similar about 2-fold improvement for Ab153_LALA.LS, CH3C.35.21:Ab153_LALA.LS, and Ab1563_LALAPG.YTE compared to Ab153_LALAPG without any serum stability mutations (FIGS. 43A and 43B). This indicates that the additional Fc mutations for TfR binding do not impact the ability of the LS mutations to improve huIgG1 half-life in vivo.

### Example 10

### Single Amino Acid Substitution of CH3C.35.21

[0608] This example describes the construction of a library of CH3C.35.21 single amino acid mutants.

### Methods

[0609] A library of CH3C.35.21 mutants each containing a single amino acid substitution of CH3C.35.21 was constructed using Kunkel mutagenesis (Kunkel, Proc Natl Acad Sci USA. 82(2):488-92, 1985). For each position of CH3C.35.21, W153, Y157, T159, E160, W161, S162, 5163, K165, T186, K187, E188, E189, F194, 5197, and 5199, as numbered according to SEQ ID NO:1 (W380, Y384, T386, E387, W388, 5389, 5390, K392, T413, K414, E415, E416, F421, 5424, and 5426, as numbered according to the EU numbering scheme) were mutated individually to the codon NNK using degenerate mutagenic oligos. To avoid obtaining the original CH3C.35.21 clone in the library, the single-stranded DNA (ssDNA) Kunkel template encoded a wild-type IgG1 Fc was used. Two mutagenic oligos (one with an NNK and the other encoding the other CH3C.35.21 region) were used in combination so that when both oligos were incorporated it yielded the CH3C.35.21 amino acid sequence, but with an NNK codon at the desired library positon. Because the template is a wild-type Fc, a single oligo insertion or no oligo insertion will not bind TfR, therefore, these constructs were easily eliminated from any analysis. Similarly, stop codons arising from the NNK positon were excluded. Libraries were transfected into EBY100 yeast. Eight colonies were sequenced from each library to ensure the naïve library contains the desired position randomization.

[0610] The top approximately 10% of the circularly permuted TfR apical domain bound population measured by yeast display and flow cytometry, were collected at a TfR concentration providing the best range for distinguishing affinities. Sequences were obtained for 12 clones for each positon. For libraries with distinct populations, the same experiment was done with better defined high, medium, low gates. There were 36 clones sequenced for each collected population. Further, in order to compare the binding of a mutant to the binding of the corresponding mutant having the wild-type residue at the corresponding amino acid position, the amino acid at the same position was reverted back to the wild-type IgG1 residue using a mutagenic oligo in similar methods.

[0611] Table 15 shows the library of CH3C.35.21 mutants. Each mutant contained a single amino acid substitution of CH3C.35.21. For example, one mutant may contain W380E and the amino acids at the rest of the positions are the same as those in CH3C.35.21. The positions shown in Table 15 are numbered according to the EU numbering scheme.

TABLE 15
CH3C.35.21 single amino acid mutants

| Position | 380 | 384 | 386 | 387 | 388 | 389 | 390 | 413 | 415 | 416 | 421 | 424 | 426 |
|---|---|---|---|---|---|---|---|---|---|---|---|---|---|
| Wild-type Fc | E | N | Q | P | E | N | N | D | S | R | N | S | S |
| CH3C.35.21 | W | Y | T | E | W | S | S | T | E | E | F | S | S |
| Residues | E | Y | T | E | W | S | S | T | S | E | F | S | S |
| found to have | L | F | N | I | | A | N | H | D | R | H | T | C |
| affinity in the | S | M | V | P | | I | R | S | G | | K | W | P |
| range: | V | P | | V | | T | T | | T | | Y | | M |
| <190 nM to | W | V | | | | V | | | P | | | | W |
| about ~500 | Y | W | | | | | | | Q | | | | |
| nM | | | | | | | | | R | | | | |

### Example 11

### Construction of CH3C.18 Variants

[0612] This example describes the construction of a library of CH3C.18 variants.

[0613] Single clones were isolated, and grown overnight in SG-CAA media supplemented with 0.2% glucose overnight to induce surface expression of CH3C.18 variants. For each clone, two million cells were washed three times in PBS+0.5% BSA at pH 7.4. Cells were stained with biotinylated target, 250 nM human TfR, 250 nM cyno TfR, or 250 nM of an unrelated biotinylated protein for 1 hour at 4° C. with shaking, then washed twice with the same buffer. Cells were stained with nuetravidin-Alexafluor647 (AF647) for 30 minutes at 4° C., then washed twice again. Expression was measured using anti-c-myc antibody with anti-chicken—Alexfluor488 (AF488) secondary antibody. Cells were resuspended, and median fluorescence intensity (MFI) of AF647 and AF488 was measured on a BD FACS Cantoll. MFI was calculated for the TfR-binding population for each population and plotted with human TfR, cyno TfR, or control binding (FIG. 44).

[0614] Table 16 shows the library of CH3C.18 variants. Each row represents a variant that contains the indicated amino acid substitutions at each position and the amino acids at the rest of the positions are the same as those in CH3C.18. The positions shown in Table 16 are numbered according to the EU numbering scheme.

TABLE 16
CH3C.18 variants

| Position | 384 | 386 | 387 | 389 | 390 | 391 | 413 | 416 | 421 |
|---|---|---|---|---|---|---|---|---|---|
| Wild-type Fc | N | Q | P | N | N | Y | D | R | N |
| CH3C.4 (CH3C.18.1) | V | T | P | A | L | Y | L | E | W |
| CH3C.2 (CH3C.18.2) | Y | T | V | S | H | Y | S | E | Y |
| CH3C.3 (CH3C.18.3) | Y | T | E | S | Q | Y | E | D | H |
| CH3C.1 (CH3C.18.4) | L | L | V | V | G | Y | A | T | W |
| CH3C.18 (CH3C.18.1.18) | L | H | V | A | V | Y | P | T | W |
| CH3C.3.1-3 | L | H | V | V | A | T | P | T | W |
| (CH3C.18.3.1-3) | | | | | | | | | |
| CH3C.3.1-9 | L | P | V | V | H | T | P | T | W |
| (CH3C.18.3.1-9) | | | | | | | | | |
| CH3C.3.2-1 | L | H | V | V | N | F | P | T | W |
| (CH3C.18.3.2-1) | | | | | | | | | |
| CH3C.3.2-5 | L | H | V | V | D | Q | P | T | W |
| (CH3C.18.3.2-5) | | | | | | | | | |
| CH3C.3.2-19 | L | H | V | V | N | Q | P | T | W |
| (CH3C.18.3.2-19) | | | | | | | | | |
| CH3C.3.4-1 | W | F | V | S | T | T | P | N | F |
| (CH3C.18.3.4-1) | | | | | | | | | |
| CH3C.3.4-19 | W | H | V | S | T | T | P | N | Y |
| (CH3C.18.3.4-19) | | | | | | | | | |
| CH3C.3.2-3 | L | H | V | V | E | Q | P | T | W |
| (CH3C.18.3.2-3) | | | | | | | | | |
| CH3C.3.2-14 | L | H | V | V | G | V | P | T | W |
| (CH3C.18.3.2-14) | | | | | | | | | |
| CH3C.3.2-24 | L | H | V | V | H | T | P | T | W |
| (CH3C.18.3.2-24) | | | | | | | | | |
| CH3C.3.4-26 | W | T | V | G | T | Y | P | N | Y |
| (CH3C.18.3.4-26) | | | | | | | | | |
| CH3C.3.2-17 | L | H | V | V | G | T | P | T | W |
| (CH3C.18.3.2-17) | | | | | | | | | |

[0615] The amino acid substitutions for each clone described in the Tables (e.g., Table 4) dictate the amino acid substitutions at the register positions of that clone over the amino acids found in the sequence set forth in the Sequence Listing, in case of discrepancy.

[0616] It is understood that the examples and embodiments described herein are for illustrative purposes only and that various modifications or changes in light thereof will be suggested to persons skilled in the art and are to be included within the spirit and purview of this application and scope of the appended claims. The sequences of the sequence accession numbers cited herein are hereby incorporated by reference.

TABLE 1
CH3C Register Positions and Mutations

| Sequence | Seq. | | | | | | | | | | | | | | | | | | |
|---|---|---|---|---|---|---|---|---|---|---|---|---|---|---|---|---|---|---|---|
| name | group | 157 | 158 | 159 | 160 | 161 | 162 | 163 | 164 | . . . | 186 | 187 | 188 | 189 | 190 | 191 | 192 | 193 | 194 |
| Wild-type | n/a | N | G | Q | P | E | N | N | Y | . . . | D | K | S | R | W | Q | Q | G | N |
| CH3C.1 | | L | G | L | V | W | V | G | Y | . . . | A | K | S | T | W | Q | Q | G | W |
| CH3C.2 | | Y | G | T | V | W | S | H | Y | . . . | S | K | S | E | W | Q | Q | G | Y |
| CH3C.3 | | Y | G | T | E | W | S | Q | Y | . . . | E | K | S | D | W | Q | Q | G | H |
| CH3C.4 | | V | G | T | P | W | A | L | Y | . . . | L | K | S | E | W | Q | Q | G | W |
| CH3C.17 | 2 | Y | G | T | V | W | S | K | Y | . . . | S | K | S | E | W | Q | Q | G | F |
| CH3C.18 | 1 | L | G | H | V | W | A | V | Y | . . . | P | K | S | T | W | Q | Q | G | W |
| CH3C.21 | 1 | L | G | L | V | W | V | G | Y | . . . | P | K | S | T | W | Q | Q | G | W |
| CH3C.25 | 1 | M | G | H | V | W | V | G | Y | . . . | D | K | S | T | W | Q | Q | G | W |
| CH3C.34 | 1 | L | G | L | V | W | V | F | S | . . . | P | K | S | T | W | Q | Q | G | W |
| CH3C.35 | 2 | Y | G | T | E | W | S | S | Y | . . . | T | K | S | E | W | Q | Q | G | F |
| CH3C.44 | 2 | Y | G | T | E | W | S | N | Y | . . . | S | K | S | E | W | Q | Q | G | F |
| CH3C.51 | 1/2 | L | G | H | V | W | V | G | Y | . . . | S | K | S | E | W | Q | Q | G | W |
| CH3C.3.1-3 | 1 | L | G | H | V | W | V | A | T | . . . | P | K | S | T | W | Q | Q | G | W |
| CH3C.3.1-9 | 1 | L | G | P | V | W | V | H | T | . . . | P | K | S | T | W | Q | Q | G | W |
| CH3C.3.2-5 | 1 | L | G | H | V | W | V | D | Q | . . . | P | K | S | T | W | Q | Q | G | W |
| CH3C.3.2-19 | 1 | L | G | H | V | W | V | N | Q | . . . | P | K | S | T | W | Q | Q | G | W |
| CH3C.3.2-1 | 1 | L | G | H | V | W | V | N | F | . . . | P | K | S | T | W | Q | Q | G | W |
| CH3C.3.4-1 | | W | G | F | V | W | S | T | Y | | P | K | S | N | W | Q | Q | G | F |
| CH3C.3.4-19 | | W | G | H | V | W | S | T | Y | | P | K | S | N | W | Q | Q | G | Y |
| CH3C.3.2-3 | | L | G | H | V | W | V | E | Q | | P | K | S | T | W | Q | Q | G | W |
| CH3C.3.2-14 | | L | G | H | V | W | V | G | V | | P | K | S | T | W | Q | Q | G | W |
| CH3C.3.2-24 | | L | G | H | V | W | V | H | T | | P | K | S | T | W | Q | Q | G | W |
| CH3C.3.4-26 | | W | G | T | V | W | G | T | Y | | P | K | S | N | W | Q | Q | G | Y |
| CH3C.3.2-17 | | L | G | H | V | W | V | G | T | | P | K | S | T | W | Q | Q | G | W |

TABLE 4
Exploration of Acceptable Diversity Within Register and Hot Spot Positions for CH3C.35.21

| | 151 | 152 | 153 | 154 | 155 | 156 | 157 | 158 | 159 | 160 | 161 | 162 | 163 | 164 |
|---|---|---|---|---|---|---|---|---|---|---|---|---|---|---|
| Wild-type | A | V | E | W | E | S | N | G | Q | P | E | N | N | Y |
| CH3C.35.20.1 | . | . | . | . | . | . | F | . | T | E | W | S | S | . |
| CH3C.35.20.2 | . | . | . | . | . | . | Y | . | T | E | W | A | S | . |
| CH3C.35.20.3 | . | . | . | . | . | . | Y | . | T | E | W | V | S | . |
| CH3C.35.20.4 | . | . | . | . | . | . | Y | . | T | E | W | S | S | . |
| CH3C.35.20.5 | . | . | . | . | . | . | F | . | T | E | W | A | S | . |
| CH3C.35.20.6 | . | . | . | . | . | . | F | . | T | E | W | V | S | . |
| CH3C.35.21.a.1 | . | . | W | . | . | . | F | . | T | E | W | S | S | . |
| CH3C.35.21.a.2 | . | . | W | . | . | . | Y | . | T | E | W | A | S | . |
| CH3C.35.21.a.3 | . | . | W | . | . | . | Y | . | T | E | W | V | S | . |
| CH3C.35.21.a.4 | . | . | W | . | . | . | Y | . | T | E | W | S | S | . |
| CH3C.35.21.a.5 | . | . | W | . | . | . | F | . | T | E | W | A | S | . |
| CH3C.35.21.a.6 | . | . | W | . | . | . | F | . | T | E | W | V | S | . |
| CH3C.35.23.1 | . | . | . | . | . | . | F | . | T | E | W | S | . | . |
| CH3C.35.23.2 | . | . | . | . | . | . | Y | . | T | E | W | A | . | . |
| CH3C.35.23.3 | . | . | . | . | . | . | Y | . | T | E | W | V | . | . |
| CH3C.35.23.4 | . | . | . | . | . | . | Y | . | T | E | W | S | . | . |
| CH3C.35.23.5 | . | . | . | . | . | . | F | . | T | E | W | A | . | . |
| CH3C.35.23.6 | . | . | . | . | . | . | F | . | T | E | W | V | . | . |
| CH3C.35.24.1 | . | . | W | . | . | . | F | . | T | E | W | S | . | . |
| CH3C.35.24.2 | . | . | W | . | . | . | Y | . | T | E | W | A | . | . |
| CH3C.35.24.3 | . | . | W | . | . | . | Y | . | T | E | W | V | . | . |
| CH3C.35.24.4 | . | . | W | . | . | . | Y | . | T | E | W | S | . | . |
| CH3C.35.24.5 | . | . | W | . | . | . | F | . | T | E | W | A | . | . |
| CH3C.35.24.6 | . | . | W | . | . | . | F | . | T | E | W | V | . | . |
| CH3C.35.21.17.1 | . | . | L | . | . | . | F | . | T | E | W | S | S | . |
| CH3C.35.21.17.2 | . | . | L | . | . | . | Y | . | T | E | W | A | S | . |
| CH3C.35.21.17.3 | . | . | L | . | . | . | Y | . | T | E | W | V | S | . |
| CH3C.35.21.17.4 | . | . | L | . | . | . | Y | . | T | E | W | S | S | . |
| CH3C.35.21.17.5 | . | . | L | . | . | . | F | . | T | E | W | A | S | . |
| CH3C.35.21.17.6 | . | . | L | . | . | . | F | . | T | E | W | V | S | . |
| CH3C.35.20 | . | . | . | . | . | . | Y | . | T | E | W | S | S | . |
| CH3C.35.21 | . | . | W | . | . | . | Y | . | T | E | W | S | S | . |
| CH3C.35.22 | . | . | W | . | . | . | Y | . | T | E | W | S | . | . |
| CH3C.35.23 | . | . | . | . | . | . | Y | . | T | E | W | S | . | . |
| CH3C.35.24 | . | . | W | . | . | . | Y | . | T | E | W | S | . | . |
| CH3C.35.21.17 | . | . | L | . | . | . | Y | . | T | E | W | S | S | . |
| CH3C.35.N390 | . | . | . | . | . | . | Y | . | T | E | W | S | . | . |
| CH3C.35.20.1.1 | | | | | | | F | | T | E | W | S | S | |
| CH3C.35.23.2.1 | | | | | | | Y | | T | E | W | A | | |
| CH3C.35.23.1.1 | | | | | | | F | | T | E | W | S | | |
| CH3C.35.S413 | | | | | | | Y | | T | E | W | S | S | |
| CH3C.35.23.3.1 | | | | | | | Y | | T | E | W | V | | |
| CH3C.35.N390.1 | | | | | | | Y | | T | E | W | S | | |
| CH3C.35.23.6.1 | | | | | | | F | | T | E | W | V | | |
| | 165 | 184 | 185 | 186 | 187 | 188 | 189 | 190 | 191 | 192 | 196 | 194 | 195 | 196 |
| Wild-type | K | T | V | D | K | S | R | W | Q | Q | G | N | V | F |
| CH3C.35.20.1 | . | . | . | T | . | E | E | . | . | . | . | F | . | . |
| CH3C.35.20.2 | . | . | . | T | . | E | E | . | . | . | . | F | . | . |
| CH3C.35.20.3 | . | . | . | T | . | E | E | . | . | . | . | F | . | . |
| CH3C.35.20.4 | . | . | . | S | . | E | E | . | . | . | . | F | . | . |
| CH3C.35.20.5 | . | . | . | T | . | E | E | . | . | . | . | F | . | . |
| CH3C.35.20.6 | . | . | . | T | . | E | E | . | . | . | . | F | . | . |
| CH3C.35.21.a.1 | . | . | . | T | . | E | E | . | . | . | . | F | . | . |
| CH3C.35.21.a.2 | . | . | . | T | . | E | E | . | . | . | . | F | . | . |
| CH3C.35.21.a.3 | . | . | . | T | . | E | E | . | . | . | . | F | . | . |
| CH3C.35.21.a.4 | . | . | . | S | . | E | E | . | . | . | . | F | . | . |
| CH3C.35.21.a.5 | . | . | . | T | . | E | E | . | . | . | . | F | . | . |
| CH3C.35.21.a.6 | . | . | . | T | . | E | E | . | . | . | . | F | . | . |
| CH3C.35.23.1 | . | . | . | T | . | E | E | . | . | . | . | F | . | . |
| CH3C.35.23.2 | . | . | . | T | . | E | E | . | . | . | . | F | . | . |
| CH3C.35.23.3 | . | . | . | T | . | E | E | . | . | . | . | F | . | . |
| CH3C.35.23.4 | . | . | . | S | . | E | E | . | . | . | . | F | . | . |
| CH3C.35.23.5 | . | . | . | T | . | E | E | . | . | . | . | F | . | . |
| CH3C.35.23.6 | . | . | . | T | . | E | E | . | . | . | . | F | . | . |
| CH3C.35.24.1 | . | . | . | T | . | E | E | . | . | . | . | F | . | . |
| CH3C.35.24.2 | . | . | . | T | . | E | E | . | . | . | . | F | . | . |
| CH3C.35.24.3 | . | . | . | T | . | E | E | . | . | . | . | F | . | . |
| CH3C.35.24.4 | . | . | . | S | . | E | E | . | . | . | . | F | . | . |
| CH3C.35.24.5 | . | . | . | T | . | E | E | . | . | . | . | F | . | . |
| CH3C.35.24.6 | . | . | . | T | . | E | E | . | . | . | . | F | . | . |
| CH3C.35.21.17.1 | . | . | . | T | . | E | E | . | . | . | . | F | . | . |
| CH3C.35.21.17.2 | . | . | . | T | . | E | E | . | . | . | . | F | . | . |
| CH3C.35.21.17.3 | . | . | . | T | . | E | E | . | . | . | . | F | . | . |
| CH3C.35.21.17.4 | . | . | . | S | . | E | E | . | . | . | . | F | . | . |
| CH3C.35.21.17.5 | . | . | . | T | . | E | E | . | . | . | . | F | . | . |
| CH3C.35.21.17.6 | . | . | . | T | . | E | E | . | . | . | . | F | . | . |
| CH3C.35.20 | . | . | . | T | . | E | E | . | . | . | . | F | . | . |
| CH3C.35.21 | . | . | . | T | . | E | E | . | . | . | . | F | . | . |
| CH3C.35.22 | . | . | . | T | . | . | E | . | . | . | . | F | . | . |
| CH3C.35.23 | . | . | . | T | . | E | E | . | . | . | . | F | . | . |
| CH3C.35.24 | . | . | . | T | . | E | E | . | . | . | . | F | . | . |
| CH3C.35.21.17 | . | . | . | T | . | E | E | . | . | . | . | F | . | . |
| CH3C.35.N390 | . | . | . | T | . | . | E | . | . | . | . | F | . | . |
| CH3C.35.20.1.1 | | | | S | | E | E | | | | | F | | |
| CH3C.35.23.2.1 | | | | S | | | E | | | | | F | | |
| CH3C.35.23.1.1 | | | | S | | E | E | | | | | F | | |
| CH3C.35.S413 | | | | S | | | E | | | | | F | | |
| CH3C.35.23.3.1 | | | | S | | E | E | | | | | F | | |
| CH3C.35.N390.1 | | | | S | | | E | | | | | F | | |
| CH3C.35.23.6.1 | | | | S | | E | E | | | | | F | | |

Informal Sequence Listing

| SEQ ID | | |
|---|---|---|
| NO: | Sequence | Description |
| 1 | PCPAPELLGGPSVFLFPPKPKDTLMISRTPEVTCVVVDVSHEDPEVKF | Wild-type human Fc |
| | NWYVDGVEVHNAKTKPREEQYNSTYRVVSVLTVLHQDWLNGKEY | sequence |
| | KCKVSNKALPAPIEKTISKAKGQPREPQVYTLPPSRDELTKNQVSLT | amino acids 1-3 (PCP) are |
| | CLVKGFYPSDIAVEWESNGQPENNYKTTPPVLDSDGSFFLYSKLTVD | from a hinge region |
| | KSRWQQGNVFSCSVMHEALHNHYTQKSLSLSPGK | |
| 2 | PCPAPELLGGPSVFLFPPKPKDTLMISRTPEVTCVVVDVSHEDPEVKF | CH2 domain sequence, |
| | NWYVDGVEVHNAKTKPREEQYNSTYRVVSVLTVLHQDWLNGKEY | including three amino acids |
| | KCKVSNKALPAPIEKTISKAK | (PCP) at the N-terminus |
| | | from the hinge region |
| 3 | GQPREPQVYTLPPSRDELTKNQVSLTCLVKGFYPSDIAVEWESNGQP | CH3 domain sequence |
| | ENNYKTTPPVLDSDGSFFLYSKLTVDKSRWQQGNVFSCSVMHEALH | |
| | NHYTQKSLSLSPGK | |
| 4 | PCPAPELLGGPSVFLFPPKPKDTLMISRTPEVTCVVVDVSHEDPEVKF | Clone CH3C.1 |
| | NWYVDGVEVHNAKTKPREEQYNSTYRVVSVLTVLHQDWLNGKEY | (Clone CH3C.18.4) |
| | KCKVSNKALPAPIEKTISKAKGQPREPQVYTLPPSRDELTKNQVSLT | |
| | CLVKGFYPSDIAVEWESLGLVWVGYKTTPPVLDSDGSFFLYSKLTV | |
| | AKSTWQQGWVFSCSVMHEALHNHYTQKSLSLSPGK | |
| 5 | PCPAPELLGGPSVFLFPPKPKDTLMISRTPEVTCVVVDVSHEDPEVKF | Clone CH3C.2 |
| | NWYVDGVEVHNAKTKPREEQYNSTYRVVSVLTVLHQDWLNGKEY | (Clone CH3C.18.2) |
| | KCKVSNKALPAPIEKTISKAKGQPREPQVYTLPPSRDELTKNQVSLT | |
| | CLVKGFYPSDIAVEWESYGTVWSHYKTTPPVLDSDGSFFLYSKLTVS | |
| | KSEWQQGYVFSCSVMHEALHNHYTQKSLSLSPGK | |
| 6 | PCPAPELLGGPSVFLFPPKPKDTLMISRTPEVTCVVVDVSHEDPEVKF | Clone CH3C.3 |
| | NWYVDGVEVHNAKTKPREEQYNSTYRVVSVLTVLHQDWLNGKEY | (Clone CH3C.18.3) |
| | KCKVSNKALPAPIEKTISKAKGQPREPQVYTLPPSRDELTKNQVSLT | |
| | CLVKGFYPSDIAVEWESYGTEWSQYKTTPPVLDSDGSFFLYSKLTVE | |
| | KSDWQQGHVFSCSVMHEALHNHYTQKSLSLSPGK | |
| 7 | PCPAPELLGGPSVFLFPPKPKDTLMISRTPEVTCVVVDVSHEDPEVKF | Clone CH3C.4 |
| | NWYVDGVEVHNAKTKPREEQYNSTYRVVSVLTVLHQDWLNGKEY | (Clone CH3C.18.1) |
| | KCKVSNKALPAPIEKTISKAKGQPREPQVYTLPPSRDELTKNQVSLT | |
| | CLVKGFYPSDIAVEWESVGTPWALYKTTPPVLDSDGSFFLYSKLTVL | |
| | KSEWQQGWVFSCSVMHEALHNHYTQKSLSLSPGK | |
| 8 | PCPAPELLGGPSVFLFPPKPKDTLMISRTPEVTCVVVDVSHEDPEVKF | Clone CH3C.17 |
| | NWYVDGVEVHNAKTKPREEQYNSTYRVVSVLTVLHQDWLNGKEY | |
| | KCKVSNKALPAPIEKTISKAKGQPREPQVYTLPPSRDELTKNQVSLT | |
| | CLVKGFYPSDIAVEWESYGTVWSKYKTTPPVLDSDGSFFLYSKLTVS | |
| | KSEWQQGFVFSCSVMHEALHNHYTQKSLSLSPGK | |
| 9 | PCPAPELLGGPSVFLFPPKPKDTLMISRTPEVTCVVVDVSHEDPEVKF | Clone CH3C.18 |
| | NWYVDGVEVHNAKTKPREEQYNSTYRVVSVLTVLHQDWLNGKEY | (Clone CH3C.18.1.18) |
| | KCKVSNKALPAPIEKTISKAKGQPREPQVYTLPPSRDELTKNQVSLT | |
| | CLVKGFYPSDIAVEWESLGHVWAVYKTTPPVLDSDGSFFLYSKLTV | |
| | PKSTWQQGWVFSCSVMHEALHNHYTQKSLSLSPGK | |
| 10 | PCPAPELLGGPSVFLFPPKPKDTLMISRTPEVTCVVVDVSHEDPEVKF | Clone CH3C.21 |
| | NWYVDGVEVHNAKTKPREEQYNSTYRVVSVLTVLHQDWLNGKEY | |
| | KCKVSNKALPAPIEKTISKAKGQPREPQVYTLPPSRDELTKNQVSLT | |
| | CLVKGFYPSDIAVEWESLGLVWVGYKTTPPVLDSDGSFFLYSKLTV | |
| | PKSTWQQGWVFSCSVMHEALHNHYTQKSLSLSPGK | |
| 11 | PCPAPELLGGPSVFLFPPKPKDTLMISRTPEVTCVVVDVSHEDPEVKF | Clone CH3C.25 |
| | NWYVDGVEVHNAKTKPREEQYNSTYRVVSVLTVLHQDWLNGKEY | |
| | KCKVSNKALPAPIEKTISKAKGQPREPQVYTLPPSRDELTKNQVSLT | |
| | CLVKGFYPSDIAVEWESMGHVWVGYKTTPPVLDSDGSFFLYSKLTV | |
| | DKSTWQQGWVFSCSVMHEALHNHYTQKSLSLSPGK | |
| 12 | PCPAPELLGGPSVFLFPPKPKDTLMISRTPEVTCVVVDVSHEDPEVKF | Clone CH3C.34 |
| | NWYVDGVEVHNAKTKPREEQYNSTYRVVSVLTVLHQDWLNGKEY | |
| | KCKVSNKALPAPIEKTISKAKGQPREPQVYTLPPSRDELTKNQVSLT | |
| | CLVKGFYPSDIAVEWESLGLVWVFSKTTPPVLDSDGSFFLYSKLTVP | |
| | KSTWQQGWVFSCSVMHEALHNHYTQKSLSLSPGK | |
| 13 | PCPAPELLGGPSVFLFPPKPKDTLMISRTPEVTCVVVDVSHEDPEVKF | Clone CH3C.35 |
| | NWYVDGVEVHNAKTKPREEQYNSTYRVVSVLTVLHQDWLNGKEY | |
| | KCKVSNKALPAPIEKTISKAKGQPREPQVYTLPPSRDELTKNQVSLT | |
| | CLVKGFYPSDIAVEWESYGTEWSSYKTTPPVLDSDGSFFLYSKLTVT | |
| | KSEWQQGFVFSCSVMHEALHNHYTQKSLSLSPGK | |
| 14 | PCPAPELLGGPSVFLFPPKPKDTLMISRTPEVTCVVVDVSHEDPEVKF | Clone CH3C.44 |
| | NWYVDGVEVHNAKTKPREEQYNSTYRVVSVLTVLHQDWLNGKEY | |
| | KCKVSNKALPAPIEKTISKAKGQPREPQVYTLPPSRDELTKNQVSLT | |
| | CLVKGFYPSDIAVEWESYGTEWSNYKTTPPVLDSDGSFFLYSKLTVS | |
| | KSEWQQGFVFSCSVMHEALHNHYTQKSLSLSPGK | |
| 15 | PCPAPELLGGPSVFLFPPKPKDTLMISRTPEVTCVVVDVSHEDPEVKF | Clone CH3C.51 |
| | NWYVDGVEVHNAKTKPREEQYNSTYRVVSVLTVLHQDWLNGKEY | |
| | KCKVSNKALPAPIEKTISKAKGQPREPQVYTLPPSRDELTKNQVSLT | |
| | CLVKGFYPSDIAVEWESLGHVWVGYKTTPPVLDSDGSFFLYSKLTV | |
| | SKSEWQQGWVFSCSVMHEALHNHYTQKSLSLSPGK | |
| 16 | PCPAPELLGGPSVFLFPPKPKDTLMISRTPEVTCVVVDVSHEDPEVKF | Clone CH3C.3.1-3 |
| | NWYVDGVEVHNAKTKPREEQYNSTYRVVSVLTVLHQDWLNGKEY | (Clone CH3C.18.3.1-3) |
| | KCKVSNKALPAPIEKTISKAKGQPREPQVYTLPPSRDELTKNQVSLT | |
| | CLVKGFYPSDIAVEWESLGHVWVATKTTPPVLDSDGSFFLYSKLTV | |
| | PKSTWQQGWVFSCSVMHEALHNHYTQKSLSLSPGK | |
| 17 | PCPAPELLGGPSVFLFPPKPKDTLMISRTPEVTCVVVDVSHEDPEVKF | Clone CH3C.3.1-9 |
| | NWYVDGVEVHNAKTKPREEQYNSTYRVVSVLTVLHQDWLNGKEY | (Clone CH3C.18.3.1-9) |
| | KCKVSNKALPAPIEKTISKAKGQPREPQVYTLPPSRDELTKNQVSLT | |
| | CLVKGFYPSDIAVEWESLGPVWVHTKTTPPVLDSDGSFFLYSKLTVP | |
| | KSTWQQGWVFSCSVMHEALHNHYTQKSLSLSPGK | |
| 18 | PCPAPELLGGPSVFLFPPKPKDTLMISRTPEVTCVVVDVSHEDPEVKF | Clone CH3C.3.2-5 |
| | NWYVDGVEVHNAKTKPREEQYNSTYRVVSVLTVLHQDWLNGKEY | (Clone CH3C.18.3.2-5) |
| | KCKVSNKALPAPIEKTISKAKGQPREPQVYTLPPSRDELTKNQVSLT | |
| | CLVKGFYPSDIAVEWESLGHVWVDQKTTPPVLDSDGSFFLYSKLTV | |
| | PKSTWQQGWVFSCSVMHEALHNHYTQKSLSLSPGK | |
| 19 | PCPAPELLGGPSVFLFPPKPKDTLMISRTPEVTCVVVDVSHEDPEVKF | Clone CH3C.3.2-19 |
| | NWYVDGVEVHNAKTKPREEQYNSTYRVVSVLTVLHQDWLNGKEY | (Clone CH3C.18.3.2-19) |
| | KCKVSNKALPAPIEKTISKAKGQPREPQVYTLPPSRDELTKNQVSLT | |
| | CLVKGFYPSDIAVEWESLGHVWVNQKTTPPVLDSDGSFFLYSKLTV | |
| | PKSTWQQGWVFSCSVMHEALHNHYTQKSLSLSPGK | |
| 20 | PCPAPELLGGPSVFLFPPKPKDTLMISRTPEVTCVVVDVSHEDPEVKF | Clone CH3C.3.2-1 |
| | NWYVDGVEVHNAKTKPREEQYNSTYRVVSVLTVLHQDWLNGKEY | (Clone CH3C.18.3.2-1) |
| | KCKVSNKALPAPIEKTISKAKGQPREPQVYTLPPSRDELTKNQVSLT | |
| | CLVKGFYPSDIAVEWESLGHVWVNFKTTPPVLDSDGSFFLYSKLTVP | |
| | KSTWQQGWVFSCSVMHEALHNHYTQKSLSLSPGK | |
| 21 | PCPAPELLGGPSVFLFPPKPKDTLMISRTPEVTCVVVDVSHEDPEVKF | Clone CH3C.18.E153W |
| | NWYVDGVEVHNAKTKPREEQYNSTYRVVSVLTVLHQDWLNGKEY | (CH3C.35.13) |
| | KCKVSNKALPAPIEKTISKAKGQPREPQVYTLPPSRDELTKNQVSLT | |
| | CLVKGFYPSDIAVWWESLGHVWAVYKTTPPVLDSDGSFFLYSKLTV | |
| | PKSTWQQGWVFSCSVMHEALHNHYTQKSLSLSPGK | |
| 22 | PCPAPELLGGPSVFLFPPKPKDTLMISRTPEVTCVVVDVSHEDPEVKF | Clone CH3C.18.K165Q |
| | NWYVDGVEVHNAKTKPREEQYNSTYRVVSVLTVLHQDWLNGKEY | (CH3C.35.14) |
| | KCKVSNKALPAPIEKTISKAKGQPREPQVYTLPPSRDELTKNQVSLT | |
| | CLVKGFYPSDIAVEWESLGHVWAVYQTTPPVLDSDGSFFLYSKLTV | |
| | PKSTWQQGWVFSCSVMHEALHNHYTQKSLSLSPGK | |
| 23 | PCPAPELLGGPSVFLFPPKPKDTLMISRTPEVTCVVVDVSHEDPEVKF | Clone CH3C.18.E153W. |
| | NWYVDGVEVHNAKTKPREEQYNSTYRVVSVLTVLHQDWLNGKEY | K165Q (CH3C.35.15) |
| | KCKVSNKALPAPIEKTISKAKGQPREPQVYTLPPSRDELTKNQVSLT | |
| | CLVKGFYPSDIAVWWESLGHVWAVYQTTPPVLDSDGSFFLYSKLTV | |
| | PKSTWQQGWVFSCSVMHEALHNHYTQKSLSLSPGK | |
| 24 | PCPAPELLGGPSVFLFPPKPKDTLMISRTPEVTCVVVDVSHEDPEVKF | Clone CH3C.35.E153W |
| | NWYVDGVEVHNAKTKPREEQYNSTYRVVSVLTVLHQDWLNGKEY | (CH3C.35.19) |
| | KCKVSNKALPAPIEKTISKAKGQPREPQVYTLPPSRDELTKNQVSLT | |
| | CLVKGFYPSDIAVWWESYGTEWSSYKTTPPVLDSDGSFFLYSKLTV | |
| | TKSEWQQGFVFSCSVMHEALHNHYTQKSLSLSPGK | |
| 25 | PCPAPELLGGPSVFLFPPKPKDTLMISRTPEVTCVVVDVSHEDPEVKF | Clone CH3C.35.S188E |
| | NWYVDGVEVHNAKTKPREEQYNSTYRVVSVLTVLHQDWLNGKEY | (CH3C.35.20) |
| | KCKVSNKALPAPIEKTISKAKGQPREPQVYTLPPSRDELTKNQVSLT | |
| | CLVKGFYPSDIAVEWESYGTEWSSYKTTPPVLDSDGSFFLYSKLTVT | |
| | KEEWQQGFVFSCSVMHEALHNHYTQKSLSLSPGK | |
| 26 | PCPAPELLGGPSVFLFPPKPKDTLMISRTPEVTCVVVDVSHEDPEVKF | Clone CH3C.35.E153W. |
| | NWYVDGVEVHNAKTKPREEQYNSTYRVVSVLTVLHQDWLNGKEY | S188E (CH3C.35.21) |
| | KCKVSNKALPAPIEKTISKAKGQPREPQVYTLPPSRDELTKNQVSLT | |
| | CLVKGFYPSDIAVWWESYGTEWSSYKTTPPVLDSDGSFFLYSKLTV | |
| | TKEEWQQGFVFSCSVMHEALHNHYTQKSLSLSPGK | |
| 27 | PCPAPELLGGPSVFLFPPKPKDTLMISRTPEVTCVVVDVSHEDPEVKF | Clone CH3C.35.N163 |
| | NWYVDGVEVHNAKTKPREEQYNSTYRVVSVLTVLHQDWLNGKEY | |
| | KCKVSNKALPAPIEKTISKAKGQPREPQVYTLPPSRDELTKNQVSLT | |
| | CLVKGFYPSDIAVEWESYGTEWSNYKTTPPVLDSDGSFFLYSKLTVT | |
| | KSEWQQGFVFSCSVMHEALHNHYTQKSLSLSPGK | |
| 28 | PCPAPELLGGPSVFLFPPKPKDTLMISRTPEVTCVVVDVSHEDPEVKF | Clone CH3C.35.K165Q |
| | NWYVDGVEVHNAKTKPREEQYNSTYRVVSVLTVLHQDWLNGKEY | |
| | KCKVSNKALPAPIEKTISKAKGQPREPQVYTLPPSRDELTKNQVSLT | |
| | CLVKGFYPSDIAVEWESYGTEWSSYQTTPPVLDSDGSFFLYSKLTVT | |
| | KSEWQQGFVFSCSVMHEALHNHYTQKSLSLSPGK | |
| 29 | PCPAPELLGGPSVFLFPPKPKDTLMISRTPEVTCVVVDVSHEDPEVKF | Clone CH3C.35.N163. |
| | NWYVDGVEVHNAKTKPREEQYNSTYRVVSVLTVLHQDWLNGKEY | K165Q |
| | KCKVSNKALPAPIEKTISKAKGQPREPQVYTLPPSRDELTKNQVSLT | |
| | CLVKGFYPSDIAVEWESYGTEWSNYQTTPPVLDSDGSFFLYSKLTVT | |
| | KSEWQQGFVFSCSVMHEALHNHYTQKSLSLSPGK | |
| 30 | NSVIIVDKNGRLVYLVENPGGYVAYSKAATVTGKLVHANFGTKKD | Human TfR apical domain |
| | FEDLYTPVNGSIVIVRAGKITFAEKVANAESLNAIGVLIYMDQTKFPI | |
| | VNAELSFFGHAHLGTGDPYTPGFPSFNHTQFPPSRSSGLPNIPVQTISR | |
| | AAAEKLFGNMEGDCPSDWKTDSTCRMVTSESKNVKLTVS | |
| 31 | NSVIIVDKNGGLVYLVENPGGYVAYSKAATVTGKLVHANFGTKKD | Cynomolgus TfR apical |
| | FEDLDSPVNGSIVIVRAGKITFAEKVANAESLNAIGVLIYMDQTKFPI | domain |
| | VKADLSFFGHAHLGTGDPYTPGFPSFNHTQFPPSQSSGLPNIPVQTIS | |
| | RAAAEKLFGNMEGDCPSDWKTDSTCKMVTSENKSVKLTVS | |
| 32 | SSGLPNIPVQTISRAAAEKLFGNMEGDCPSDWKTDSTCRMVTSESKN | Loop-truncated human TfR |
| | VKLTVSNDSAQNSVIIVDKNGRLVYLVENPGGYVAYSKAATVTGKL | apical domain displayed |
| | VHANFGTKKDFEDLYTPVNGSIVIVRAGKITFAEKVANAESLNAIGV | on phage |
| | LIYMDQTKFPIVNAELSGP | |
| 33 | SSGLPNIPVQTISRAAAEKLFGNMEGDCPSDWKTDSTCKMVTSENK | Loop-truncated |
| | SVKLTVSNDSAQNSVIIVDKNGGLVYLVENPGGYVAYSKAATVTGK | cynomolgus TfR apical |
| | LVHANFGTKKDFEDLDSPVNGSIVIVRAGKITFAEKVANAESLNAIG | domain displayed on phage |
| | VLIYMDQTKFPIVKADLSGP | |
| 34 | WESXGXXXXXYK | First portion CH3C |
| | | register |
| 35 | TVXKSXWQQGXV | Second portion CH3C |
| | | register |
| 36 | YGTEW | CH3C conserved sequence |
| 37 | EPKSCDKTHTCPPCP | Human IgG1 hinge amino |
| | | acid sequence |
| 38 | MMDQARSAFSNLFGGEPLSYTRFSLARQVDGDNSHVEMKLAVDEE | Human transferrin receptor |
| | ENADNNTKANVTKPKRCSGSICYGTIAVIVFFLIGFMIGYLGYCKGV | protein 1 (TFR1) |
| | EPKTECERLAGTESPVREEPGEDFPAARRLYWDDLKRKLSEKLDST | |
| | DFTGTIKLLNENSYVPREAGSQKDENLALYVENQFREFKLSKVWRD | |
| | QHFVKIQVKDSAQNSVIIVDKNGRLVYLVENPGGYVAYSKAATVTG | |
| | KLVHANFGTKKDFEDLYTPVNGSIVIVRAGKITFAEKVANAESLNAI | |
| | GVLIYMDQTKFPIVNAELSFFGHAHLGTGDPYTPGFPSFNHTQFPPSR | |
| | SSGLPNIPVQTISRAAAEKLFGNMEGDCPSDWKTDSTCRMVTSESKN | |
| | VKLTVSNVLKEIKILNIFGVIKGFVEPDHYVVVGAQRDAWGPGAAK | |
| | SGVGTALLLKLAQMFSDMVLKDGFQPSRSIIFASWSAGDFGSVGAT | |
| | EWLEGYLSSLHLKAFTYINLDKAVLGTSNFKVSASPLLYTLIEKTMQ | |
| | NVKHPVTGQFLYQDSNWASKVEKLTLDNAAFPFLAYSGIPAVSFCF | |
| | CEDTDYPYLGTTMDTYKELIERIPELNKVARAAAEVAGQFVIKLTH | |
| | DVELNLDYERYNSQLLSFVRDLNQYRADIKEMGLSLQWLYSARGD | |
| | FFRATSRLTTDFGNAEKTDRFVMKKLNDRVMRVEYHFLSPYVSPKE | |
| | SPFRHVFWGSGSHTLPALLENLKLRKQNNGAFNETLFRNQLALATW | |
| | TIQGAANALSGDVWDIDNEF | |
| 39 | PCPAPELLGGPSVFLFPPKPKDTLMISRTPEVTCVVVDVSHEDPEVKF | Clone CH3C.35.19 |
| | NWYVDGVEVHNAKTKPREEQYNSTYRVVSVLTVLHQDWLNGKEY | |
| | KCKVSNKALPAPIEKTISKAKGQPREPQVYTLPPSRDELTKNQVSLT | |
| | CLVKGFYPSDIAVWWESYGTEWSSYKTTPPVLDSDGSFFLYSKLTV | |
| | TKSEWQQGFVFSCSVMHEALHNHYTQKSLSLSPGK | |
| 40 | PCPAPELLGGPSVFLFPPKPKDTLMISRTPEVTCVVVDVSHEDPEVKF | Clone CH3C.35.20 |
| | NWYVDGVEVHNAKTKPREEQYNSTYRVVSVLTVLHQDWLNGKEY | |
| | KCKVSNKALPAPIEKTISKAKGQPREPQVYTLPPSRDELTKNQVSLT | |
| | CLVKGFYPSDIAVEWESYGTEWSSYKTTPPVLDSDGSFFLYSKLTVT | |
| | KEEWQQGFVFSCSVMHEALHNHYTQKSLSLSPGK | |
| 41 | PCPAPELLGGPSVFLFPPKPKDTLMISRTPEVTCVVVDVSHEDPEVKF | Clone CH3C.35.21 |
| | NWYVDGVEVHNAKTKPREEQYNSTYRVVSVLTVLHQDWLNGKEY | |
| | KCKVSNKALPAPIEKTISKAKGQPREPQVYTLPPSRDELTKNQVSLT | |
| | CLVKGFYPSDIAVWWESYGTEWSSYKTTPPVLDSDGSFFLYSKLTV | |
| | TKEEWQQGFVFSCSVMHEALHNHYTQKSLSLSPGK | |
| 42 | PCPAPELLGGPSVFLFPPKPKDTLMISRTPEVTCVVVDVSHEDPEVKF | Clone CH3C.35.22 |
| | NWYVDGVEVHNAKTKPREEQYNSTYRVVSVLTVLHQDWLNGKEY | |
| | KCKVSNKALPAPIEKTISKAKGQPREPQVYTLPPSRDELTKNQVSLT | |
| | CLVKGFYPSDIAVWWESYGTEWSNYKTTPPVLDSDGSFFLYSKLTV | |
| | TKSEWQQGFVFSCSVMHEALHNHYTQKSLSLSPGK | |
| 43 | PCPAPELLGGPSVFLFPPKPKDTLMISRTPEVTCVVVDVSHEDPEVKF | Clone CH3C.35.23 |
| | NWYVDGVEVHNAKTKPREEQYNSTYRVVSVLTVLHQDWLNGKEY | |
| | KCKVSNKALPAPIEKTISKAKGQPREPQVYTLPPSRDELTKNQVSLT | |
| | CLVKGFYPSDIAVEWESYGTEWSNYKTTPPVLDSDGSFFLYSKLTVT | |
| | KEEWQQGFVFSCSVMHEALHNHYTQKSLSLSPGK | |
| 44 | PCPAPELLGGPSVFLFPPKPKDTLMISRTPEVTCVVVDVSHEDPEVKF | Clone CH3C.35.24 |
| | NWYVDGVEVHNAKTKPREEQYNSTYRVVSVLTVLHQDWLNGKEY | |
| | KCKVSNKALPAPIEKTISKAKGQPREPQVYTLPPSRDELTKNQVSLT | |
| | CLVKGFYPSDIAVWWESYGTEWSNYKTTPPVLDSDGSFFLYSKLTV | |
| | TKEEWQQGFVFSCSVMHEALHNHYTQKSLSLSPGK | |
| 45 | PCPAPELLGGPSVFLFPPKPKDTLMISRTPEVTCVVVDVSHEDPEVKF | CH3C.18 variant |
| | NWYVDGVEVHNAKTKPREEQYNSTYRVVSVLTVLHQDWLNGKEY | |
| | KCKVSNKALPAPIEKTISKAKGQPREPQVYTLPPSRDELTKNQVSLT | |
| | CLVKGFYPSDIAVWWESLGHVWAVYKTTPPVLDSDGSFFLYSKLTV | |
| | PKSTWQQGWVFSCSVMHEALHNHYTQKSLSLSPGK | |
| 46 | PCPAPELLGGPSVFLFPPKPKDTLMISRTPEVTCVVVDVSHEDPEVKF | CH3C.18 variant |
| | NWYVDGVEVHNAKTKPREEQYNSTYRVVSVLTVLHQDWLNGKEY | |
| | KCKVSNKALPAPIEKTISKAKGQPREPQVYTLPPSRDELTKNQVSLT | |
| | CLVKGFYPSDIAVLWESLGHVWAVYKTTPPVLDSDGSFFLYSKLTV | |
| | PKSTWQQGWVFSCSVMHEALHNHYTQKSLSLSPGK | |
| 47 | PCPAPELLGGPSVFLFPPKPKDTLMISRTPEVTCVVVDVSHEDPEVKF | CH3C.18 variant |
| | NWYVDGVEVHNAKTKPREEQYNSTYRVVSVLTVLHQDWLNGKEY | |
| | KCKVSNKALPAPIEKTISKAKGQPREPQVYTLPPSRDELTKNQVSLT | |
| | CLVKGFYPSDIAVYWESLGHVWAVYKTTPPVLDSDGSFFLYSKLTV | |
| | PKSTWQQGWVFSCSVMHEALHNHYTQKSLSLSPGK | |
| 48 | PCPAPELLGGPSVFLFPPKPKDTLMISRTPEVTCVVVDVSHEDPEVKF | CH3C.18 variant |
| | NWYVDGVEVHNAKTKPREEQYNSTYRVVSVLTVLHQDWLNGKEY | |
| | KCKVSNKALPAPIEKTISKAKGQPREPQVYTLPPSRDELTKNQVSLT | |
| | CLVKGFYPSDIAVEWESLGHVWAVYQTTPPVLDSDGSFFLYSKLTV | |
| | PKSTWQQGWVFSCSVMHEALHNHYTQKSLSLSPGK | |
| 49 | PCPAPELLGGPSVFLFPPKPKDTLMISRTPEVTCVVVDVSHEDPEVKF | CH3C.18 variant |
| | NWYVDGVEVHNAKTKPREEQYNSTYRVVSVLTVLHQDWLNGKEY | |
| | KCKVSNKALPAPIEKTISKAKGQPREPQVYTLPPSRDELTKNQVSLT | |
| | CLVKGFYPSDIAVEWESLGHVWAVYFTTPPVLDSDGSFFLYSKLTVP | |
| | KSTWQQGWVFSCSVMHEALHNHYTQKSLSLSPGK | |
| 50 | PCPAPELLGGPSVFLFPPKPKDTLMISRTPEVTCVVVDVSHEDPEVKF | CH3C.18 variant |
| | NWYVDGVEVHNAKTKPREEQYNSTYRVVSVLTVLHQDWLNGKEY | |
| | KCKVSNKALPAPIEKTISKAKGQPREPQVYTLPPSRDELTKNQVSLT | |
| | CLVKGFYPSDIAVEWESLGHVWAVYHTTPPVLDSDGSFFLYSKLTV | |
| | PKSTWQQGWVFSCSVMHEALHNHYTQKSLSLSPGK | |
| 51 | PCPAPELLGGPSVFLFPPKPKDTLMISRTPEVTCVVVDVSHEDPEVKF | Clone CH3C.35.21.1 |
| | NWYVDGVEVHNAKTKPREEQYNSTYRVVSVLTVLHQDWLNGKEY | |
| | KCKVSNKALPAPIEKTISKAKGQPREPQVYTLPPSRDELTKNQVSLT | |
| | CLVKGFYPSDIAVLWESYGTEWSSYKTTPPVLDSDGSFFLYSKLTVT | |
| | KSEWQQGFVFSCSVMHEALHNHYTQKSLSLSPGK | |
| 52 | PCPAPELLGGPSVFLFPPKPKDTLMISRTPEVTCVVVDVSHEDPEVKF | Clone CH3C.35.21.2 |
| | NWYVDGVEVHNAKTKPREEQYNSTYRVVSVLTVLHQDWLNGKEY | |
| | KCKVSNKALPAPIEKTISKAKGQPREPQVYTLPPSRDELTKNQVSLT | |
| | CLVKGFYPSDIAVLWESYGTEWSSYRTTPPVLDSDGSFFLYSKLTVT | |
| | KSEWQQGFVFSCSVMHEALHNHYTQKSLSLSPGK | |
| 53 | PCPAPELLGGPSVFLFPPKPKDTLMISRTPEVTCVVVDVSHEDPEVKF | Clone CH3C.35.21.3 |
| | NWYVDGVEVHNAKTKPREEQYNSTYRVVSVLTVLHQDWLNGKEY | |
| | KCKVSNKALPAPIEKTISKAKGQPREPQVYTLPPSRDELTKNQVSLT | |
| | CLVKGFYPSDIAVLWESYGTEWSSYRTTPPVLDSDGSFFLYSKLTVT | |
| | REEWQQGFVFSCSVMHEALHNHYTQKSLSLSPGK | |
| 54 | PCPAPELLGGPSVFLFPPKPKDTLMISRTPEVTCVVVDVSHEDPEVKF | Clone CH3C.35.21.4 |
| | NWYVDGVEVHNAKTKPREEQYNSTYRVVSVLTVLHQDWLNGKEY | |
| | KCKVSNKALPAPIEKTISKAKGQPREPQVYTLPPSRDELTKNQVSLT | |
| | CLVKGFYPSDIAVLWESYGTEWSSYRTTPPVLDSDGSFFLYSKLTVT | |
| | GEEWQQGFVFSCSVMHEALHNHYTQKSLSLSPGK | |
| 55 | PCPAPELLGGPSVFLFPPKPKDTLMISRTPEVTCVVVDVSHEDPEVKF | Clone CH3C.35.21.5 |
| | NWYVDGVEVHNAKTKPREEQYNSTYRVVSVLTVLHQDWLNGKEY | |
| | KCKVSNKALPAPIEKTISKAKGQPREPQVYTLPPSRDELTKNQVSLT | |
| | CLVKGFYPSDIAVLWESYGTEWSSYRTTPPVLDSDGSFFLYSKLTVT | |
| | REEWQQGFVFSCWVMHEALHNHYTQKSLSLSPGK | |
| 56 | PCPAPELLGGPSVFLFPPKPKDTLMISRTPEVTCVVVDVSHEDPEVKF | Clone CH3C.35.21.6 |
| | NWYVDGVEVHNAKTKPREEQYNSTYRVVSVLTVLHQDWLNGKEY | |
| | KCKVSNKALPAPIEKTISKAKGQPREPQVYTLPPSRDELTKNQVSLT | |
| | CLVKGFYPSDIAVLWESYGTEWSSYRTTPPVLDSDGSFFLYSKLTVT | |
| | KEEWQQGFVFSCWVMHEALHNHYTQKSLSLSPGK | |
| 57 | PCPAPELLGGPSVFLFPPKPKDTLMISRTPEVTCVVVDVSHEDPEVKF | Clone CH3C.35.21.7 |
| | NWYVDGVEVHNAKTKPREEQYNSTYRVVSVLTVLHQDWLNGKEY | |
| | KCKVSNKALPAPIEKTISKAKGQPREPQVYTLPPSRDELTKNQVSLT | |
| | CLVKGFYPSDIAVLWESYGTEWSSYRTTPPVLDSDGSFFLYSKLTVT | |
| | REEWQQGFVFTCWVMHEALHNHYTQKSLSLSPGK | |
| 58 | PCPAPELLGGPSVFLFPPKPKDTLMISRTPEVTCVVVDVSHEDPEVKF | Clone CH3C.35.21.8 |
| | NWYVDGVEVHNAKTKPREEQYNSTYRVVSVLTVLHQDWLNGKEY | |
| | KCKVSNKALPAPIEKTISKAKGQPREPQVYTLPPSRDELTKNQVSLT | |
| | CLVKGFYPSDIAVLWESYGTEWSSYRTTPPVLDSDGSFFLYSKLTVT | |
| | REEWQQGFVFTCGVMHEALHNHYTQKSLSLSPGK | |
| 59 | PCPAPELLGGPSVFLFPPKPKDTLMISRTPEVTCVVVDVSHEDPEVKF | Clone CH3C.35.21.9 |
| | NWYVDGVEVHNAKTKPREEQYNSTYRVVSVLTVLHQDWLNGKEY | |
| | KCKVSNKALPAPIEKTISKAKGQPREPQVYTLPPSRDELTKNQVSLT | |
| | CLVKGFYPSDIAVLWESYGTEWSSYRTTPPVLDSDGSFFLYSKLTVT | |
| | REEWQQGFVFECWVMHEALHNHYTQKSLSLSPGK | |
| 60 | PCPAPELLGGPSVFLFPPKPKDTLMISRTPEVTCVVVDVSHEDPEVKF | Clone CH3C.35.21.10 |
| | NWYVDGVEVHNAKTKPREEQYNSTYRVVSVLTVLHQDWLNGKEY | |
| | KCKVSNKALPAPIEKTISKAKGQPREPQVYTLPPSRDELTKNQVSLT | |
| | CLVKGFYPSDIAVLWESYGTEWSSYRTTPPVLDSDGSFFLYSKLTVT | |
| | REEWQQGFVFKCWVMHEALHNHYTQKSLSLSPGK | |
| 61 | PCPAPELLGGPSVFLFPPKPKDTLMISRTPEVTCVVVDVSHEDPEVKF | Clone CH3C.35.21.11 |
| | NWYVDGVEVHNAKTKPREEQYNSTYRVVSVLTVLHQDWLNGKEY | |
| | KCKVSNKALPAPIEKTISKAKGQPREPQVYTLPPSRDELTKNQVSLT | |
| | CLVKGFYPSDIAVLWESYGTEWSSYRTTPPVLDSDGSFFLYSKLTVT | |
| | PEEWQQGFVFKCWVMHEALHNHYTQKSLSLSPGK | |
| 62 | PCPAPELLGGPSVFLFPPKPKDTLMISRTPEVTCVVVDVSHEDPEVKF | Clone CH3C.35.21.12 |
| | NWYVDGVEVHNAKTKPREEQYNSTYRVVSVLTVLHQDWLNGKEY | |
| | KCKVSNKALPAPIEKTISKAKGQPREPQVYTLPPSRDELTKNQVSLT | |
| | CLVKGFYPSDIAVWWESYGTEWSSYRTTPPVLDSDGSFFLYSKLTV | |
| | TREEWQQGFVFSCSVMHEALHNHYTQKSLSLSPGK | |
| 63 | PCPAPELLGGPSVFLFPPKPKDTLMISRTPEVTCVVVDVSHEDPEVKF | Clone CH3C.35.21.13 |
| | NWYVDGVEVHNAKTKPREEQYNSTYRVVSVLTVLHQDWLNGKEY | |
| | KCKVSNKALPAPIEKTISKAKGQPREPQVYTLPPSRDELTKNQVSLT | |
| | CLVKGFYPSDIAVWWESYGTEWSSYRTTPPVLDSDGSFFLYSKLTV | |
| | TGEEWQQGFVFSCSVMHEALHNHYTQKSLSLSPGK | |
| 64 | PCPAPELLGGPSVFLFPPKPKDTLMISRTPEVTCVVVDVSHEDPEVKF | Clone CH3C.35.21.14 |
| | NWYVDGVEVHNAKTKPREEQYNSTYRVVSVLTVLHQDWLNGKEY | |
| | KCKVSNKALPAPIEKTISKAKGQPREPQVYTLPPSRDELTKNQVSLT | |
| | CLVKGFYPSDIAVWWESYGTEWSSYRTTPPVLDSDGSFFLYSKLTV | |
| | TREEWQQGFVFTCWVMHEALHNHYTQKSLSLSPGK | |
| 65 | PCPAPELLGGPSVFLFPPKPKDTLMISRTPEVTCVVVDVSHEDPEVKF | Clone CH3C.35.21.15 |
| | NWYVDGVEVHNAKTKPREEQYNSTYRVVSVLTVLHQDWLNGKEY | |
| | KCKVSNKALPAPIEKTISKAKGQPREPQVYTLPPSRDELTKNQVSLT | |
| | CLVKGFYPSDIAVWWESYGTEWSSYRTTPPVLDSDGSFFLYSKLTV | |
| | TGEEWQQGFVFTCWVMHEALHNHYTQKSLSLSPGK | |
| 66 | PCPAPELLGGPSVFLFPPKPKDTLMISRTPEVTCVVVDVSHEDPEVKF | Clone CH3C.35.21.16 |
| | NWYVDGVEVHNAKTKPREEQYNSTYRVVSVLTVLHQDWLNGKEY | |
| | KCKVSNKALPAPIEKTISKAKGQPREPQVYTLPPSRDELTKNQVSLT | |
| | CLVKGFYPSDIAVWWESYGTEWSSYRTTPPVLDSDGSFFLYSKLTV | |
| | TREEWQQGFVFTCGVMHEALHNHYTQKSLSLSPGK | |
| 67 | PCPAPELLGGPSVFLFPPKPKDTLMISRTPEVTCVVVDVSHEDPEVKF | Clone CH3C.35.21.17 |
| | NWYVDGVEVHNAKTKPREEQYNSTYRVVSVLTVLHQDWLNGKEY | |
| | KCKVSNKALPAPIEKTISKAKGQPREPQVYTLPPSRDELTKNQVSLT | |
| | CLVKGFYPSDIAVLWESYGTEWSSYKTTPPVLDSDGSFFLYSKLTVT | |
| | KEEWQQGFVFSCSVMHEALHNHYTQKSLSLSPGK | |
| 68 | PCPAPELLGGPSVFLFPPKPKDTLMISRTPEVTCVVVDVSHEDPEVKF | Clone CH3C.35.21.18 |
| | NWYVDGVEVHNAKTKPREEQYNSTYRVVSVLTVLHQDWLNGKEY | |
| | KCKVSNKALPAPIEKTISKAKGQPREPQVYTLPPSRDELTKNQVSLT | |
| | CLVKGFYPSDIAVLWESYGTEWSSYRTTPPVLDSDGSFFLYSKLTVT | |
| | KEEWQQGFVFSCSVMHEALHNHYTQKSLSLSPGK | |
| 69 | PCPAPELLGGPSVFLFPPKPKDTLMISRTPEVTCVVVDVSHEDPEVKF | Clone CH3C.35.20.1 |
| | NWYVDGVEVHNAKTKPREEQYNSTYRVVSVLTVLHQDWLNGKEY | |
| | KCKVSNKALPAPIEKTISKAKGQPREPQVYTLPPSRDELTKNQVSLT | |
| | CLVKGFYPSDIAVEWESFGTEWSSYKTTPPVLDSDGSFFLYSKLTVT | |
| | KEEWQQGFVFSCSVMHEALHNHYTQKSLSLSPGK | |
| 70 | PCPAPELLGGPSVFLFPPKPKDTLMISRTPEVTCVVVDVSHEDPEVKF | Clone CH3C.35.20.2 |
| | NWYVDGVEVHNAKTKPREEQYNSTYRVVSVLTVLHQDWLNGKEY | |
| | KCKVSNKALPAPIEKTISKAKGQPREPQVYTLPPSRDELTKNQVSLT | |
| | CLVKGFYPSDIAVEWESYGTEWASYKTTPPVLDSDGSFFLYSKLTVT | |
| | KEEWQQGFVFSCSVMHEALHNHYTQKSLSLSPGK | |
| 71 | PCPAPELLGGPSVFLFPPKPKDTLMISRTPEVTCVVVDVSHEDPEVKF | Clone CH3C.35.20.3 |
| | NWYVDGVEVHNAKTKPREEQYNSTYRVVSVLTVLHQDWLNGKEY | |
| | KCKVSNKALPAPIEKTISKAKGQPREPQVYTLPPSRDELTKNQVSLT | |
| | CLVKGFYPSDIAVEWESYGTEWVSYKTTPPVLDSDGSFFLYSKLTVT | |
| | KEEWQQGFVFSCSVMHEALHNHYTQKSLSLSPGK | |
| 72 | PCPAPELLGGPSVFLFPPKPKDTLMISRTPEVTCVVVDVSHEDPEVKF | Clone CH3C.35.20.4 |
| | NWYVDGVEVHNAKTKPREEQYNSTYRVVSVLTVLHQDWLNGKEY | |
| | KCKVSNKALPAPIEKTISKAKGQPREPQVYTLPPSRDELTKNQVSLT | |
| | CLVKGFYPSDIAVEWESYGTEWSSYKTTPPVLDSDGSFFLYSKLTVS | |
| | KEEWQQGFVFSCSVMHEALHNHYTQKSLSLSPGK | |
| 73 | PCPAPELLGGPSVFLFPPKPKDTLMISRTPEVTCVVVDVSHEDPEVKF | Clone CH3C.35.20.5 |
| | NWYVDGVEVHNAKTKPREEQYNSTYRVVSVLTVLHQDWLNGKEY | |
| | KCKVSNKALPAPIEKTISKAKGQPREPQVYTLPPSRDELTKNQVSLT | |
| | CLVKGFYPSDIAVEWESFGTEWASYKTTPPVLDSDGSFFLYSKLTVT | |
| | KEEWQQGFVFSCSVMHEALHNHYTQKSLSLSPGK | |
| 74 | PCPAPELLGGPSVFLFPPKPKDTLMISRTPEVTCVVVDVSHEDPEVKF | Clone CH3C.35.20.6 |
| | NWYVDGVEVHNAKTKPREEQYNSTYRVVSVLTVLHQDWLNGKEY | |
| | KCKVSNKALPAPIEKTISKAKGQPREPQVYTLPPSRDELTKNQVSLT | |
| | CLVKGFYPSDIAVEWESFGTEWVSYKTTPPVLDSDGSFFLYSKLTVT | |
| | KEEWQQGFVFSCSVMHEALHNHYTQKSLSLSPGK | |
| 75 | PCPAPELLGGPSVFLFPPKPKDTLMISRTPEVTCVVVDVSHEDPEVKF | Clone CH3C35.21.a.1 |
| | NWYVDGVEVHNAKTKPREEQYNSTYRVVSVLTVLHQDWLNGKEY | |
| | KCKVSNKALPAPIEKTISKAKGQPREPQVYTLPPSRDELTKNQVSLT | |
| | CLVKGFYPSDIAVWWESFGTEWSSYKTTPPVLDSDGSFFLYSKLTVT | |
| | KEEWQQGFVFSCSVMHEALHNHYTQKSLSLSPGK | |
| 76 | PCPAPELLGGPSVFLFPPKPKDTLMISRTPEVTCVVVDVSHEDPEVKF | Clone CH3C.35.21.a.2 |
| | NWYVDGVEVHNAKTKPREEQYNSTYRVVSVLTVLHQDWLNGKEY | |
| | KCKVSNKALPAPIEKTISKAKGQPREPQVYTLPPSRDELTKNQVSLT | |
| | CLVKGFYPSDIAVWWESYGTEWASYKTTPPVLDSDGSFFLYSKLTV | |
| | TKEEWQQGFVFSCSVMHEALHNHYTQKSLSLSPGK | |
| 77 | PCPAPELLGGPSVFLFPPKPKDTLMISRTPEVTCVVVDVSHEDPEVKF | Clone CH3C.35.21.a.3 |
| | NWYVDGVEVHNAKTKPREEQYNSTYRVVSVLTVLHQDWLNGKEY | |
| | KCKVSNKALPAPIEKTISKAKGQPREPQVYTLPPSRDELTKNQVSLT | |
| | CLVKGFYPSDIAVWWESYGTEWVSYKTTPPVLDSDGSFFLYSKLTV | |
| | TKEEWQQGFVFSCSVMHEALHNHYTQKSLSLSPGK | |
| 78 | PCPAPELLGGPSVFLFPPKPKDTLMISRTPEVTCVVVDVSHEDPEVKF | Clone CH3C.35.21.a.4 |
| | NWYVDGVEVHNAKTKPREEQYNSTYRVVSVLTVLHQDWLNGKEY | |
| | KCKVSNKALPAPIEKTISKAKGQPREPQVYTLPPSRDELTKNQVSLT | |
| | CLVKGFYPSDIAVWWESYGTEWSSYKTTPPVLDSDGSFFLYSKLTV | |
| | SKEEWQQGFVFSCSVMHEALHNHYTQKSLSLSPGK | |
| 79 | PCPAPELLGGPSVFLFPPKPKDTLMISRTPEVTCVVVDVSHEDPEVKF | Clone CH3C.35.21.a.5 |
| | NWYVDGVEVHNAKTKPREEQYNSTYRVVSVLTVLHQDWLNGKEY | |
| | KCKVSNKALPAPIEKTISKAKGQPREPQVYTLPPSRDELTKNQVSLT | |
| | CLVKGFYPSDIAVWWESFGTEWASYKTTPPVLDSDGSFFLYSKLTV | |
| | TKEEWQQGFVFSCSVMHEALHNHYTQKSLSLSPGK | |
| 80 | PCPAPELLGGPSVFLFPPKPKDTLMISRTPEVTCVVVDVSHEDPEVKF | Clone CH3C.35.21.a.6 |
| | NWYVDGVEVHNAKTKPREEQYNSTYRVVSVLTVLHQDWLNGKEY | |
| | KCKVSNKALPAPIEKTISKAKGQPREPQVYTLPPSRDELTKNQVSLT | |
| | CLVKGFYPSDIAVWWESFGTEWVSYKTTPPVLDSDGSFFLYSKLTV | |
| | TKEEWQQGFVFSCSVMHEALHNHYTQKSLSLSPGK | |
| 81 | PCPAPELLGGPSVFLFPPKPKDTLMISRTPEVTCVVVDVSHEDPEVKF | Clone CH3C.35.23.1 |
| | NWYVDGVEVHNAKTKPREEQYNSTYRVVSVLTVLHQDWLNGKEY | |
| | KCKVSNKALPAPIEKTISKAKGQPREPQVYTLPPSRDELTKNQVSLT | |
| | CLVKGFYPSDIAVEWESFGTEWSNYKTTPPVLDSDGSFFLYSKLTVT | |
| | KEEWQQGFVFSCSVMHEALHNHYTQKSLSLSPGK | |
| 82 | PCPAPELLGGPSVFLFPPKPKDTLMISRTPEVTCVVVDVSHEDPEVKF | Clone CH3C.35.23.2 |
| | NWYVDGVEVHNAKTKPREEQYNSTYRVVSVLTVLHQDWLNGKEY | |
| | KCKVSNKALPAPIEKTISKAKGQPREPQVYTLPPSRDELTKNQVSLT | |
| | CLVKGFYPSDIAVEWESYGTEWANYKTTPPVLDSDGSFFLYSKLTV | |
| | TKEEWQQGFVFSCSVMHEALHNHYTQKSLSLSPGK | |
| 83 | PCPAPELLGGPSVFLFPPKPKDTLMISRTPEVTCVVVDVSHEDPEVKF | Clone CH3C.35.23.3 |
| | NWYVDGVEVHNAKTKPREEQYNSTYRVVSVLTVLHQDWLNGKEY | |
| | KCKVSNKALPAPIEKTISKAKGQPREPQVYTLPPSRDELTKNQVSLT | |
| | CLVKGFYPSDIAVEWESYGTEWVNYKTTPPVLDSDGSFFLYSKLTV | |
| | TKEEWQQGFVFSCSVMHEALHNHYTQKSLSLSPGK | |
| 84 | PCPAPELLGGPSVFLFPPKPKDTLMISRTPEVTCVVVDVSHEDPEVKF | Clone CH3C.35.23.4 |
| | NWYVDGVEVHNAKTKPREEQYNSTYRVVSVLTVLHQDWLNGKEY | |
| | KCKVSNKALPAPIEKTISKAKGQPREPQVYTLPPSRDELTKNQVSLT | |
| | CLVKGFYPSDIAVEWESYGTEWSNYKTTPPVLDSDGSFFLYSKLTVS | |
| | KEEWQQGFVFSCSVMHEALHNHYTQKSLSLSPGK | |
| 85 | PCPAPELLGGPSVFLFPPKPKDTLMISRTPEVTCVVVDVSHEDPEVKF | Clone CH3C.35.23.5 |
| | NWYVDGVEVHNAKTKPREEQYNSTYRVVSVLTVLHQDWLNGKEY | |
| | KCKVSNKALPAPIEKTISKAKGQPREPQVYTLPPSRDELTKNQVSLT | |
| | CLVKGFYPSDIAVEWESFGTEWANYKTTPPVLDSDGSFFLYSKLTVT | |
| | KEEWQQGFVFSCSVMHEALHNHYTQKSLSLSPGK | |
| 86 | PCPAPELLGGPSVFLFPPKPKDTLMISRTPEVTCVVVDVSHEDPEVKF | Clone CH3C.35.23.6 |
| | NWYVDGVEVHNAKTKPREEQYNSTYRVVSVLTVLHQDWLNGKEY | |
| | KCKVSNKALPAPIEKTISKAKGQPREPQVYTLPPSRDELTKNQVSLT | |
| | CLVKGFYPSDIAVEWESFGTEWVNYKTTPPVLDSDGSFFLYSKLTVT | |
| | KEEWQQGFVFSCSVMHEALHNHYTQKSLSLSPGK | |
| 87 | PCPAPELLGGPSVFLFPPKPKDTLMISRTPEVTCVVVDVSHEDPEVKF | Clone CH3C.35.24.1 |
| | NWYVDGVEVHNAKTKPREEQYNSTYRVVSVLTVLHQDWLNGKEY | |
| | KCKVSNKALPAPIEKTISKAKGQPREPQVYTLPPSRDELTKNQVSLT | |
| | CLVKGFYPSDIAVWWESFGTEWSNYKTTPPVLDSDGSFFLYSKLTV | |
| | TKEEWQQGFVFSCSVMHEALHNHYTQKSLSLSPGK | |
| 88 | PCPAPELLGGPSVFLFPPKPKDTLMISRTPEVTCVVVDVSHEDPEVKF | Clone CH3C.35.24.2 |
| | NWYVDGVEVHNAKTKPREEQYNSTYRVVSVLTVLHQDWLNGKEY | |
| | KCKVSNKALPAPIEKTISKAKGQPREPQVYTLPPSRDELTKNQVSLT | |
| | CLVKGFYPSDIAVWWESYGTEWANYKTTPPVLDSDGSFFLYSKLTV | |
| | TKEEWQQGFVFSCSVMHEALHNHYTQKSLSLSPGK | |
| 89 | PCPAPELLGGPSVFLFPPKPKDTLMISRTPEVTCVVVDVSHEDPEVKF | Clone CH3C.35.24.3 |
| | NWYVDGVEVHNAKTKPREEQYNSTYRVVSVLTVLHQDWLNGKEY | |
| | KCKVSNKALPAPIEKTISKAKGQPREPQVYTLPPSRDELTKNQVSLT | |
| | CLVKGFYPSDIAVWWESYGTEWVNYKTTPPVLDSDGSFFLYSKLTV | |
| | TKEEWQQGFVFSCSVMHEALHNHYTQKSLSLSPGK | |
| 90 | PCPAPELLGGPSVFLFPPKPKDTLMISRTPEVTCVVVDVSHEDPEVKF | Clone CH3C.35.24.4 |
| | NWYVDGVEVHNAKTKPREEQYNSTYRVVSVLTVLHQDWLNGKEY | |
| | KCKVSNKALPAPIEKTISKAKGQPREPQVYTLPPSRDELTKNQVSLT | |
| | CLVKGFYPSDIAVWWESYGTEWSNYKTTPPVLDSDGSFFLYSKLTV | |
| | SKEEWQQGFVFSCSVMHEALHNHYTQKSLSLSPGK | |
| 91 | PCPAPELLGGPSVFLFPPKPKDTLMISRTPEVTCVVVDVSHEDPEVKF | Clone CH3C.35.24.5 |
| | NWYVDGVEVHNAKTKPREEQYNSTYRVVSVLTVLHQDWLNGKEY | |
| | KCKVSNKALPAPIEKTISKAKGQPREPQVYTLPPSRDELTKNQVSLT | |
| | CLVKGFYPSDIAVWWESFGTEWANYKTTPPVLDSDGSFFLYSKLTV | |
| | TKEEWQQGFVFSCSVMHEALHNHYTQKSLSLSPGK | |
| 92 | PCPAPELLGGPSVFLFPPKPKDTLMISRTPEVTCVVVDVSHEDPEVKF | Clone CH3C.35.24.6 |
| | NWYVDGVEVHNAKTKPREEQYNSTYRVVSVLTVLHQDWLNGKEY | |
| | KCKVSNKALPAPIEKTISKAKGQPREPQVYTLPPSRDELTKNQVSLT | |
| | CLVKGFYPSDIAVWWESFGTEWVNYKTTPPVLDSDGSFFLYSKLTV | |
| | TKEEWQQGFVFSCSVMHEALHNHYTQKSLSLSPGK | |
| 93 | PCPAPELLGGPSVFLFPPKPKDTLMISRTPEVTCVVVDVSHEDPEVKF | Clone CH3C.35.21.17.1 |
| | NWYVDGVEVHNAKTKPREEQYNSTYRVVSVLTVLHQDWLNGKEY | |
| | KCKVSNKALPAPIEKTISKAKGQPREPQVYTLPPSRDELTKNQVSLT | |
| | CLVKGFYPSDIAVLWESFGTEWSSYKTTPPVLDSDGSFFLYSKLTVT | |
| | KEEWQQGFVFSCSVMHEALHNHYTQKSLSLSPGK | |
| 94 | PCPAPELLGGPSVFLFPPKPKDTLMISRTPEVTCVVVDVSHEDPEVKF | Clone CH3C.35.21.17.2 |
| | NWYVDGVEVHNAKTKPREEQYNSTYRVVSVLTVLHQDWLNGKEY | |
| | KCKVSNKALPAPIEKTISKAKGQPREPQVYTLPPSRDELTKNQVSLT | |
| | CLVKGFYPSDIAVLWESYGTEWASYKTTPPVLDSDGSFFLYSKLTVT | |
| | KEEWQQGFVFSCSVMHEALHNHYTQKSLSLSPGK | |
| 95 | PCPAPELLGGPSVFLFPPKPKDTLMISRTPEVTCVVVDVSHEDPEVKF | Clone CH3C.35.21.17.3 |
| | NWYVDGVEVHNAKTKPREEQYNSTYRVVSVLTVLHQDWLNGKEY | |
| | KCKVSNKALPAPIEKTISKAKGQPREPQVYTLPPSRDELTKNQVSLT | |
| | CLVKGFYPSDIAVLWESYGTEWVSYKTTPPVLDSDGSFFLYSKLTVT | |
| | KEEWQQGFVFSCSVMHEALHNHYTQKSLSLSPGK | |
| 96 | PCPAPELLGGPSVFLFPPKPKDTLMISRTPEVTCVVVDVSHEDPEVKF | Clone CH3C.35.21.17.4 |
| | NWYVDGVEVHNAKTKPREEQYNSTYRVVSVLTVLHQDWLNGKEY | |
| | KCKVSNKALPAPIEKTISKAKGQPREPQVYTLPPSRDELTKNQVSLT | |
| | CLVKGFYPSDIAVLWESYGTEWSSYKTTPPVLDSDGSFFLYSKLTVS | |
| | KEEWQQGFVFSCSVMHEALHNHYTQKSLSLSPGK | |
| 97 | PCPAPELLGGPSVFLFPPKPKDTLMISRTPEVTCVVVDVSHEDPEVKF | Clone CH3C.35.21.17.5 |
| | NWYVDGVEVHNAKTKPREEQYNSTYRVVSVLTVLHQDWLNGKEY | |
| | KCKVSNKALPAPIEKTISKAKGQPREPQVYTLPPSRDELTKNQVSLT | |
| | CLVKGFYPSDIAVLWESFGTEWASYKTTPPVLDSDGSFFLYSKLTVT | |
| | KEEWQQGFVFSCSVMHEALHNHYTQKSLSLSPGK | |
| 98 | PCPAPELLGGPSVFLFPPKPKDTLMISRTPEVTCVVVDVSHEDPEVKF | Clone CH3C.35.21.17.6 |
| | NWYVDGVEVHNAKTKPREEQYNSTYRVVSVLTVLHQDWLNGKEY | |
| | KCKVSNKALPAPIEKTISKAKGQPREPQVYTLPPSRDELTKNQVSLT | |
| | CLVKGFYPSDIAVLWESFGTEWVSYKTTPPVLDSDGSFFLYSKLTVT | |
| | KEEWQQGFVFSCSVMHEALHNHYTQKSLSLSPGK | |
| 99 | PCPAPELLGGPSVFLFPPKPKDTLMISRTPEVTCVVVDVSHEDPEVKF | Clone CH3C.35.N390 |
| | NWYVDGVEVHNAKTKPREEQYNSTYRVVSVLTVLHQDWLNGKEY | |
| | KCKVSNKALPAPIEKTISKAKGQPREPQVYTLPPSRDELTKNQVSLT | |
| | CLVKGFYPSDIAVEWESYGTEWSNYKTTPPVLDSDGSFFLYSKLTVT | |
| | KSEWQQGFVFSCSVMHEALHNHYTQKSLSLSPGK | |
| 100 | PCPAPELLGGPSVFLFPPKPKDTLMISRTPEVTCVVVDVSHEDPEVKF | Clone CH3C.35.16 |
| | NWYVDGVEVHNAKTKPREEQYNSTYRVVSVLTVLHQDWLNGKEY | |
| | KCKVSNKALPAPIEKTISKAKGQPREPQVYTLPPSRDELTKNQVSLT | |
| | CLVKGFYPSDIAVWWESLGHVWVNQKTTPPVLDSDGSFFLYSKLTV | |
| | PKSTWQQGWVFSCSVMHEALHNHYTQKSLSLSPGK | |
| 101 | PCPAPELLGGPSVFLFPPKPKDTLMISRTPEVTCVVVDVSHEDPEVKF | Clone CH3C.35.17 |
| | NWYVDGVEVHNAKTKPREEQYNSTYRVVSVLTVLHQDWLNGKEY | |
| | KCKVSNKALPAPIEKTISKAKGQPREPQVYTLPPSRDELTKNQVSLT | |
| | CLVKGFYPSDIAVEWESLGHVWVNQQTTPPVLDSDGSFFLYSKLTV | |
| | PKSTWQQGWVFSCSVMHEALHNHYTQKSLSLSPGK | |
| 102 | PCPAPELLGGPSVFLFPPKPKDTLMISRTPEVTCVVVDVSHEDPEVKF | Clone CH3C.35.18 |
| | NWYVDGVEVHNAKTKPREEQYNSTYRVVSVLTVLHQDWLNGKEY | |
| | KCKVSNKALPAPIEKTISKAKGQPREPQVYTLPPSRDELTKNQVSLT | |
| | CLVKGFYPSDIAVWWESLGHVWVNQQTTPPVLDSDGSFFLYSKLTV | |
| | PKSTWQQGWVFSCSVMHEALHNHYTQKSLSLSPGK | |
| 103 | MMDQARSAFSNLFGGEPLSYTRFSLARQVDGDNSHVEMKLGVDEE | Cyno TfR |
| | ENTDNNTKANGTKPKRCGGNICYGTIAVIIFFLIGFMIGYLGYCKGV | |
| | EPKTECERLAGTESPAREEPEEDFPAAPRLYWDDLKRKLSEKLDTTD | |
| | FTSTIKLLNENLYVPREAGSQKDENLALYIENQFREFKLSKVWRDQH | |
| | FVKIQVKDSAQNSVIIVDKNGGLVYLVENPGGYVAYSKAATVTGKL | |
| | VHANFGTKKDFEDLDSPVNGSIVIVRAGKITFAEKVANAESLNAIGV | |
| | LIYMDQTKFPIVKADLSFFGHAHLGTGDPYTPGFPSFNHTQFPPSQSS | |
| | GLPNIPVQTISRAAAEKLFGNMEGDCPSDWKTDSTCKMVTSENKSV | |
| | KLTVSNVLKETKILNIFGVIKGFVEPDHYVVVGAQRDAWGPGAAKS | |
| | SVGTALLLKLAQMFSDMVLKDGFQPSRSIIFASWSAGDFGSVGATE | |
| | WLEGYLSSLHLKAFTYINLDKAVLGTSNFKVSASPLLYTLIEKTMQD | |
| | VKHPVTGRSLYQDSNWASKVEKLTLDNAAFPFLAYSGIPAVSFCFC | |
| | EDTDYPYLGTTMDTYKELVERIPELNKVARAAAEVAGQFVIKLTHD | |
| | TELNLDYERYNSQLLLFLRDLNQYRADVKEMGLSLQWLYSARGDF | |
| | FRATSRLTTDFRNAEKRDKFVMKKLNDRVMRVEYYFLSPYVSPKES | |
| | PFRHVFWGSGSHTLSALLESLKLRRQNNSAFNETLFRNQLALATWTI | |
| | QGAANALSGDVWDIDNEF | |
| 104 | MGWSCIILFLVATATGAYAGTSSGLPNIPVQTISRAAAEKLFGNMEG | His-tagged permutated TfR |
| | DCPSDWKTDSTCRMVTSESKNVKLTVSNDSAQNSVIIVDKNGRLVY | apical domain |
| | LVENPGGYVAYSKAATVTGKLVHANFGTKKDFEDLYTPVNGSIVIV | |
| | RAGKITFAEKVANAESLNAIGVLIYMDQTKFPIVNAELSASHHHHHH | |
| 105 | METDTLLLWVLLLWVPGSTGDKTHTCPPCPAPEAAGGPSVFLFPPK | Expressed CH3C.18 Fc |
| | PKDTLYITREPEVTCVVVDVSHEDPEVKFNWYVDGVEVHNAKTKP | sequence |
| | REEQYNSTYRVVSVLTVLHQDWLNGKEYKCKVSNKALGAPIEKTIS | |
| | KAKGQPREPQVYTLPPSRDELTKNQVSLTCLVKGFYPSDIAVEWESL | |
| | GHVWAVYKTTPPVLDSDGSFFLYSKLTVPKSTWQQGWVFSCSVMH | |
| | EALHNHYTQKSLSLSPGK | |
| 106 | TVXKXXWQQGXV | Second portion CH3C |
| | | register |
| 107 | PCPAPEAAGGPSVFLFPPKPKDTLYITREPEVTCVVVDVSHEDPEVKF | Clone CH3C.35.8 |
| | NWYVDGVEVHNAKTKPREEQYNSTYRVVSVLTVLHQDWLNGKEY | (Clone CH3C.35.20 with |
| | KCKVSNKALGAPIEKTISKAKGQPREPQVYTLPPSRDELTKNQVSLT | YTE and LALAPG |
| | CLVKGFYPSDIAVEWESYGTEWSSYKTTPPVLDSDGSFFLYSKLTVT | mutations) |
| | KEEWQQGFVFSCSVMHEALHNHYTQKSLSLSPGK | |
| 108 | PCPAPEAAGGPSVFLFPPKPKDTLYITREPEVTCVVVDVSHEDPEVKF | Clone CH3C.35.9 |
| | NWYVDGVEVHNAKTKPREEQYNSTYRVVSVLTVLHQDWLNGKEY | (Clone CH3C.35.21 with |
| | KCKVSNKALGAPIEKTISKAKGQPREPQVYTLPPSRDELTKNQVSLT | YTE and LALAPG |
| | CLVKGFYPSDIAVEWESFGTEWSSYKTTPPVLDSDGSFFLYSKLTVT | mutations) |
| | KEEWQQGFVFSCSVMHEALHNHYTQKSLSLSPGK | |
| 109 | PCPAPELLGGPSVFLFPPKPKDTLMISRTPEVTCVVVDVSHEDPEVKF | Clone CH3C.35.20.1 with |
| | NWYVDGVEVHNAKTKPREEQYNSTYRVVSVLTVLHQDWLNGKEY | knob mutation |
| | KCKVSNKALPAPIEKTISKAKGQPREPQVYTLPPSRDELTKNQVSLW | |
| | CLVKGFYPSDIAVEWESFGTEWSSYKTTPPVLDSDGSFFLYSKLTVT | |
| | KEEWQQGFVFSCSVMHEALHNHYTQKSLSLSPGK | |
| 110 | PCPAPEAAGGPSVFLFPPKPKDTLMISRTPEVTCVVVDVSHEDPEVK | Clone CH3C.35.20.1 with |
| | FNWYVDGVEVHNAKTKPREEQYNSTYRVVSVLTVLHQDWLNGKE | knob and LALA mutations |
| | YKCKVSNKALPAPIEKTISKAKGQPREPQVYTLPPSRDELTKNQVSL | |
| | WCLVKGFYPSDIAVEWESFGTEWSSYKTTPPVLDSDGSFFLYSKLTV | |
| | TKEEWQQGFVFSCSVMHEALHNHYTQKSLSLSPGK | |
| 111 | PCPAPEAAGGPSVFLFPPKPKDTLMISRTPEVTCVVVDVSHEDPEVK | Clone CH3C.35.20.1 with |
| | FNWYVDGVEVHNAKTKPREEQYNSTYRVVSVLTVLHQDWLNGKE | knob and LALAPG |
| | YKCKVSNKALGAPIEKTISKAKGQPREPQVYTLPPSRDELTKNQVSL | mutations |
| | WCLVKGFYPSDIAVEWESFGTEWSSYKTTPPVLDSDGSFFLYSKLTV | |
| | TKEEWQQGFVFSCSVMHEALHNHYTQKSLSLSPGK | |
| 112 | PCPAPELLGGPSVFLFPPKPKDTLYITREPEVTCVVVDVSHEDPEVKF | Clone CH3C.35.20.1 with |
| | NWYVDGVEVHNAKTKPREEQYNSTYRVVSVLTVLHQDWLNGKEY | knob and YTE mutations |
| | KCKVSNKALPAPIEKTISKAKGQPREPQVYTLPPSRDELTKNQVSLW | |
| | CLVKGFYPSDIAVEWESFGTEWSSYKTTPPVLDSDGSFFLYSKLTVT | |
| | KEEWQQGFVFSCSVMHEALHNHYTQKSLSLSPGK | |
| 113 | PCPAPEAAGGPSVFLFPPKPKDTLYITREPEVTCVVVDVSHEDPEVKF | Clone CH3C.35.20.1 with |
| | NWYVDGVEVHNAKTKPREEQYNSTYRVVSVLTVLHQDWLNGKEY | knob, LALA, and YTE |
| | KCKVSNKALPAPIEKTISKAKGQPREPQVYTLPPSRDELTKNQVSLW | mutations |
| | CLVKGFYPSDIAVEWESFGTEWSSYKTTPPVLDSDGSFFLYSKLTVT | |
| | KEEWQQGFVFSCSVMHEALHNHYTQKSLSLSPGK | |
| 114 | PCPAPEAAGGPSVFLFPPKPKDTLYITREPEVTCVVVDVSHEDPEVKF | Clone CH3C.35.20.1 with |
| | NWYVDGVEVHNAKTKPREEQYNSTYRVVSVLTVLHQDWLNGKEY | knob, LALAPG, and YTE |
| | KCKVSNKALGAPIEKTISKAKGQPREPQVYTLPPSRDELTKNQVSLW | mutations |
| | CLVKGFYPSDIAVEWESFGTEWSSYKTTPPVLDSDGSFFLYSKLTVT | |
| | KEEWQQGFVFSCSVMHEALHNHYTQKSLSLSPGK | |
| 115 | PCPAPELLGGPSVFLFPPKPKDTLMISRTPEVTCVVVDVSHEDPEVKF | Clone CH3C.35.20.1 with |
| | NWYVDGVEVHNAKTKPREEQYNSTYRVVSVLTVLHQDWLNGKEY | hole mutations |
| | KCKVSNKALPAPIEKTISKAKGQPREPQVYTLPPSRDELTKNQVSLS | |
| | CAVKGFYPSDIAVEWESFGTEWSSYKTTPPVLDSDGSFFLVSKLTVT | |
| | KEEWQQGFVFSCSVMHEALHNHYTQKSLSLSPGK | |
| 116 | PCPAPEAAGGPSVFLFPPKPKDTLMISRTPEVTCVVVDVSHEDPEVK | Clone CH3C.35.20.1 with |
| | FNWYVDGVEVHNAKTKPREEQYNSTYRVVSVLTVLHQDWLNGKE | hole and LALA mutations |
| | YKCKVSNKALPAPIEKTISKAKGQPREPQVYTLPPSRDELTKNQVSL | |
| | SCAVKGFYPSDIAVEWESFGTEWSSYKTTPPVLDSDGSFFLVSKLTV | |
| | TKEEWQQGFVFSCSVMHEALHNHYTQKSLSLSPGK | |
| 117 | PCPAPEAAGGPSVFLFPPKPKDTLMISRTPEVTCVVVDVSHEDPEVK | Clone CH3C.35.20.1 with |
| | FNWYVDGVEVHNAKTKPREEQYNSTYRVVSVLTVLHQDWLNGKE | hole and LALAPG |
| | YKCKVSNKALGAPIEKTISKAKGQPREPQVYTLPPSRDELTKNQVSL | mutations |
| | SCAVKGFYPSDIAVEWESFGTEWSSYKTTPPVLDSDGSFFLVSKLTV | |
| | TKEEWQQGFVFSCSVMHEALHNHYTQKSLSLSPGK | |
| 118 | PCPAPELLGGPSVFLFPPKPKDTLYITREPEVTCVVVDVSHEDPEVKF | Clone CH3C.35.20.1 with |
| | NWYVDGVEVHNAKTKPREEQYNSTYRVVSVLTVLHQDWLNGKEY | hole and YTE mutations |
| | KCKVSNKALPAPIEKTISKAKGQPREPQVYTLPPSRDELTKNQVSLS | |
| | CAVKGFYPSDIAVEWESFGTEWSSYKTTPPVLDSDGSFFLVSKLTVT | |
| | KEEWQQGFVFSCSVMHEALHNHYTQKSLSLSPGK | |
| 119 | PCPAPEAAGGPSVFLFPPKPKDTLYITREPEVTCVVVDVSHEDPEVKF | Clone CH3C.35.20.1 with |
| | NWYVDGVEVHNAKTKPREEQYNSTYRVVSVLTVLHQDWLNGKEY | hole, LALA, and YTE |
| | KCKVSNKALPAPIEKTISKAKGQPREPQVYTLPPSRDELTKNQVSLS | mutations |
| | CAVKGFYPSDIAVEWESFGTEWSSYKTTPPVLDSDGSFFLVSKLTVT | |
| | KEEWQQGFVFSCSVMHEALHNHYTQKSLSLSPGK | |
| 120 | PCPAPEAAGGPSVFLFPPKPKDTLYITREPEVTCVVVDVSHEDPEVKF | Clone CH3C.35.20.1 with |
| | NWYVDGVEVHNAKTKPREEQYNSTYRVVSVLTVLHQDWLNGKEY | hole, LALAPG, and YTE |
| | KCKVSNKALGAPIEKTISKAKGQPREPQVYTLPPSRDELTKNQVSLS | mutations |
| | CAVKGFYPSDIAVEWESFGTEWSSYKTTPPVLDSDGSFFLVSKLTVT | |
| | KEEWQQGFVFSCSVMHEALHNHYTQKSLSLSPGK | |
| 121 | PCPAPELLGGPSVFLFPPKPKDTLMISRTPEVTCVVVDVSHEDPEVKF | Clone CH3C.35.23.2 with |
| | NWYVDGVEVHNAKTKPREEQYNSTYRVVSVLTVLHQDWLNGKEY | knob mutation |
| | KCKVSNKALPAPIEKTISKAKGQPREPQVYTLPPSRDELTKNQVSLW | |
| | CLVKGFYPSDIAVEWESYGTEWANYKTTPPVLDSDGSFFLYSKLTV | |
| | TKEEWQQGFVFSCSVMHEALHNHYTQKSLSLSPGK | |
| 122 | PCPAPEAAGGPSVFLFPPKPKDTLMISRTPEVTCVVVDVSHEDPEVK | Clone CH3C.35.23.2 with |
| | FNWYVDGVEVHNAKTKPREEQYNSTYRVVSVLTVLHQDWLNGKE | knob and LALA mutations |
| | YKCKVSNKALPAPIEKTISKAKGQPREPQVYTLPPSRDELTKNQVSL | |
| | WCLVKGFYPSDIAVEWESYGTEWANYKTTPPVLDSDGSFFLYSKLT | |
| | VTKEEWQQGFVFSCSVMHEALHNHYTQKSLSLSPGK | |
| 123 | PCPAPEAAGGPSVFLFPPKPKDTLMISRTPEVTCVVVDVSHEDPEVK | Clone CH3C.35.23.2 with |
| | FNWYVDGVEVHNAKTKPREEQYNSTYRVVSVLTVLHQDWLNGKE | knob and LALAPG |
| | YKCKVSNKALGAPIEKTISKAKGQPREPQVYTLPPSRDELTKNQVSL | mutations |
| | WCLVKGFYPSDIAVEWESYGTEWANYKTTPPVLDSDGSFFLYSKLT | |
| | VTKEEWQQGFVFSCSVMHEALHNHYTQKSLSLSPGK | |
| 124 | PCPAPELLGGPSVFLFPPKPKDTLYITREPEVTCVVVDVSHEDPEVKF | Clone CH3C.35.23.2 with |
| | NWYVDGVEVHNAKTKPREEQYNSTYRVVSVLTVLHQDWLNGKEY | knob and YTE mutations |
| | KCKVSNKALPAPIEKTISKAKGQPREPQVYTLPPSRDELTKNQVSLW | |
| | CLVKGFYPSDIAVEWESYGTEWANYKTTPPVLDSDGSFFLYSKLTV | |
| | TKEEWQQGFVFSCSVMHEALHNHYTQKSLSLSPGK | |
| 125 | PCPAPEAAGGPSVFLFPPKPKDTLYITREPEVTCVVVDVSHEDPEVKF | Clone CH3C.35.23.2 with |
| | NWYVDGVEVHNAKTKPREEQYNSTYRVVSVLTVLHQDWLNGKEY | knob, LALA, and YTE |
| | KCKVSNKALPAPIEKTISKAKGQPREPQVYTLPPSRDELTKNQVSLW | mutations |
| | CLVKGFYPSDIAVEWESYGTEWANYKTTPPVLDSDGSFFLYSKLTV | |
| | TKEEWQQGFVFSCSVMHEALHNHYTQKSLSLSPGK | |
| 126 | PCPAPEAAGGPSVFLFPPKPKDTLYITREPEVTCVVVDVSHEDPEVKF | Clone CH3C.35.23.2 with |
| | NWYVDGVEVHNAKTKPREEQYNSTYRVVSVLTVLHQDWLNGKEY | knob, LALAPG, and YTE |
| | KCKVSNKALGAPIEKTISKAKGQPREPQVYTLPPSRDELTKNQVSLW | mutations |
| | CLVKGFYPSDIAVEWESYGTEWANYKTTPPVLDSDGSFFLYSKLTV | |
| | TKEEWQQGFVFSCSVMHEALHNHYTQKSLSLSPGK | |
| 127 | PCPAPELLGGPSVFLFPPKPKDTLMISRTPEVTCVVVDVSHEDPEVKF | Clone CH3C.35.23.2 with |
| | NWYVDGVEVHNAKTKPREEQYNSTYRVVSVLTVLHQDWLNGKEY | hole mutations |
| | KCKVSNKALPAPIEKTISKAKGQPREPQVYTLPPSRDELTKNQVSLS | |
| | CAVKGFYPSDIAVEWESYGTEWANYKTTPPVLDSDGSFFLVSKLTV | |
| | TKEEWQQGFVFSCSVMHEALHNHYTQKSLSLSPGK | |
| 128 | PCPAPEAAGGPSVFLFPPKPKDTLMISRTPEVTCVVVDVSHEDPEVK | Clone CH3C.35.23.2 with |
| | FNWYVDGVEVHNAKTKPREEQYNSTYRVVSVLTVLHQDWLNGKE | hole and LALA mutations |
| | YKCKVSNKALPAPIEKTISKAKGQPREPQVYTLPPSRDELTKNQVSL | |
| | SCAVKGFYPSDIAVEWESYGTEWANYKTTPPVLDSDGSFFLVSKLT | |
| | VTKEEWQQGFVFSCSVMHEALHNHYTQKSLSLSPGK | |
| 129 | PCPAPEAAGGPSVFLFPPKPKDTLMISRTPEVTCVVVDVSHEDPEVK | Clone CH3C.35.23.2 with |
| | FNWYVDGVEVHNAKTKPREEQYNSTYRVVSVLTVLHQDWLNGKE | hole and LALAPG |
| | YKCKVSNKALGAPIEKTISKAKGQPREPQVYTLPPSRDELTKNQVSL | mutations |
| | SCAVKGFYPSDIAVEWESYGTEWANYKTTPPVLDSDGSFFLVSKLT | |
| | VTKEEWQQGFVFSCSVMHEALHNHYTQKSLSLSPGK | |
| 130 | PCPAPELLGGPSVFLFPPKPKDTLYITREPEVTCVVVDVSHEDPEVKF | Clone CH3C.35.23.2 with |
| | NWYVDGVEVHNAKTKPREEQYNSTYRVVSVLTVLHQDWLNGKEY | hole and YTE mutations |
| | KCKVSNKALPAPIEKTISKAKGQPREPQVYTLPPSRDELTKNQVSLS | |
| | CAVKGFYPSDIAVEWESYGTEWANYKTTPPVLDSDGSFFLVSKLTV | |
| | TKEEWQQGFVFSCSVMHEALHNHYTQKSLSLSPGK | |
| 131 | PCPAPEAAGGPSVFLFPPKPKDTLYITREPEVTCVVVDVSHEDPEVKF | Clone CH3C.35.23.2 with |
| | NWYVDGVEVHNAKTKPREEQYNSTYRVVSVLTVLHQDWLNGKEY | hole, LALA, and YTE |
| | KCKVSNKALPAPIEKTISKAKGQPREPQVYTLPPSRDELTKNQVSLS | mutations |
| | CAVKGFYPSDIAVEWESYGTEWANYKTTPPVLDSDGSFFLVSKLTV | |
| | TKEEWQQGFVFSCSVMHEALHNHYTQKSLSLSPGK | |
| 132 | PCPAPEAAGGPSVFLFPPKPKDTLYITREPEVTCVVVDVSHEDPEVKF | Clone CH3C.35.23.2 with |
| | NWYVDGVEVHNAKTKPREEQYNSTYRVVSVLTVLHQDWLNGKEY | hole, LALAPG, and YTE |
| | KCKVSNKALGAPIEKTISKAKGQPREPQVYTLPPSRDELTKNQVSLS | mutations |
| | CAVKGFYPSDIAVEWESYGTEWANYKTTPPVLDSDGSFFLVSKLTV | |
| | TKEEWQQGFVFSCSVMHEALHNHYTQKSLSLSPGK | |
| 133 | PCPAPELLGGPSVFLFPPKPKDTLMISRTPEVTCVVVDVSHEDPEVKF | Clone CH3C.35.23.3 with |
| | NWYVDGVEVHNAKTKPREEQYNSTYRVVSVLTVLHQDWLNGKEY | knob mutation |
| | KCKVSNKALPAPIEKTISKAKGQPREPQVYTLPPSRDELTKNQVSLW | |
| | CLVKGFYPSDIAVEWESYGTEWVNYKTTPPVLDSDGSFFLYSKLTV | |
| | TKEEWQQGFVFSCSVMHEALHNHYTQKSLSLSPGK | |
| 134 | PCPAPEAAGGPSVFLFPPKPKDTLMISRTPEVTCVVVDVSHEDPEVK | Clone CH3C.35.23.3 with |
| | FNWYVDGVEVHNAKTKPREEQYNSTYRVVSVLTVLHQDWLNGKE | knob and LALA mutations |
| | YKCKVSNKALPAPIEKTISKAKGQPREPQVYTLPPSRDELTKNQVSL | |
| | WCLVKGFYPSDIAVEWESYGTEWVNYKTTPPVLDSDGSFFLYSKLT | |
| | VTKEEWQQGFVFSCSVMHEALHNHYTQKSLSLSPGK | |
| 135 | PCPAPEAAGGPSVFLFPPKPKDTLMISRTPEVTCVVVDVSHEDPEVK | Clone CH3C.35.23.3 with |
| | FNWYVDGVEVHNAKTKPREEQYNSTYRVVSVLTVLHQDWLNGKE | knob and LALAPG |
| | YKCKVSNKALGAPIEKTISKAKGQPREPQVYTLPPSRDELTKNQVSL | mutations |
| | WCLVKGFYPSDIAVEWESYGTEWVNYKTTPPVLDSDGSFFLYSKLT | |
| | VTKEEWQQGFVFSCSVMHEALHNHYTQKSLSLSPGK | |
| 136 | PCPAPELLGGPSVFLFPPKPKDTLYITREPEVTCVVVDVSHEDPEVKF | Clone CH3C.35.23.3 with |
| | NWYVDGVEVHNAKTKPREEQYNSTYRVVSVLTVLHQDWLNGKEY | knob and YTE mutations |
| | KCKVSNKALPAPIEKTISKAKGQPREPQVYTLPPSRDELTKNQVSLW | |
| | CLVKGFYPSDIAVEWESYGTEWVNYKTTPPVLDSDGSFFLYSKLTV | |
| | TKEEWQQGFVFSCSVMHEALHNHYTQKSLSLSPGK | |
| 137 | PCPAPEAAGGPSVFLFPPKPKDTLYITREPEVTCVVVDVSHEDPEVKF | Clone CH3C.35.23.3 with |
| | NWYVDGVEVHNAKTKPREEQYNSTYRVVSVLTVLHQDWLNGKEY | knob, LALA, and YTE |
| | KCKVSNKALPAPIEKTISKAKGQPREPQVYTLPPSRDELTKNQVSLW | mutations |
| | CLVKGFYPSDIAVEWESYGTEWVNYKTTPPVLDSDGSFFLYSKLTV | |
| | TKEEWQQGFVFSCSVMHEALHNHYTQKSLSLSPGK | |
| 138 | PCPAPEAAGGPSVFLFPPKPKDTLYITREPEVTCVVVDVSHEDPEVKF | Clone CH3C.35.23.3 with |
| | NWYVDGVEVHNAKTKPREEQYNSTYRVVSVLTVLHQDWLNGKEY | knob, LALAPG, and YTE |
| | KCKVSNKALGAPIEKTISKAKGQPREPQVYTLPPSRDELTKNQVSLW | mutations |
| | CLVKGFYPSDIAVEWESYGTEWVNYKTTPPVLDSDGSFFLYSKLTV | |
| | TKEEWQQGFVFSCSVMHEALHNHYTQKSLSLSPGK | |
| 139 | PCPAPELLGGPSVFLFPPKPKDTLMISRTPEVTCVVVDVSHEDPEVKF | Clone CH3C.35.23.3 with |
| | NWYVDGVEVHNAKTKPREEQYNSTYRVVSVLTVLHQDWLNGKEY | hole mutations |
| | KCKVSNKALPAPIEKTISKAKGQPREPQVYTLPPSRDELTKNQVSLS | |
| | CAVKGFYPSDIAVEWESYGTEWVNYKTTPPVLDSDGSFFLVSKLTV | |
| | TKEEWQQGFVFSCSVMHEALHNHYTQKSLSLSPGK | |
| 140 | PCPAPEAAGGPSVFLFPPKPKDTLMISRTPEVTCVVVDVSHEDPEVK | Clone CH3C.35.23.3 with |
| | FNWYVDGVEVHNAKTKPREEQYNSTYRVVSVLTVLHQDWLNGKE | hole and LALA mutations |
| | YKCKVSNKALPAPIEKTISKAKGQPREPQVYTLPPSRDELTKNQVSL | |
| | SCAVKGFYPSDIAVEWESYGTEWVNYKTTPPVLDSDGSFFLVSKLT | |
| | VTKEEWQQGFVFSCSVMHEALHNHYTQKSLSLSPGK | |
| 141 | PCPAPEAAGGPSVFLFPPKPKDTLMISRTPEVTCVVVDVSHEDPEVK | Clone CH3C.35.23.3 with |
| | FNWYVDGVEVHNAKTKPREEQYNSTYRVVSVLTVLHQDWLNGKE | hole and LALAPG |
| | YKCKVSNKALGAPIEKTISKAKGQPREPQVYTLPPSRDELTKNQVSL | mutations |
| | SCAVKGFYPSDIAVEWESYGTEWVNYKTTPPVLDSDGSFFLVSKLT | |
| | VTKEEWQQGFVFSCSVMHEALHNHYTQKSLSLSPGK | |
| 142 | PCPAPELLGGPSVFLFPPKPKDTLYITREPEVTCVVVDVSHEDPEVKF | Clone CH3C.35.23.3 with |
| | NWYVDGVEVHNAKTKPREEQYNSTYRVVSVLTVLHQDWLNGKEY | hole and YTE mutations |
| | KCKVSNKALPAPIEKTISKAKGQPREPQVYTLPPSRDELTKNQVSLS | |
| | CAVKGFYPSDIAVEWESYGTEWVNYKTTPPVLDSDGSFFLVSKLTV | |
| | TKEEWQQGFVFSCSVMHEALHNHYTQKSLSLSPGK | |
| 143 | PCPAPEAAGGPSVFLFPPKPKDTLYITREPEVTCVVVDVSHEDPEVKF | Clone CH3C.35.23.3 with |
| | NWYVDGVEVHNAKTKPREEQYNSTYRVVSVLTVLHQDWLNGKEY | hole, LALA, and YTE |
| | KCKVSNKALPAPIEKTISKAKGQPREPQVYTLPPSRDELTKNQVSLS | mutations |
| | CAVKGFYPSDIAVEWESYGTEWVNYKTTPPVLDSDGSFFLVSKLTV | |
| | TKEEWQQGFVFSCSVMHEALHNHYTQKSLSLSPGK | |
| 144 | PCPAPEAAGGPSVFLFPPKPKDTLYITREPEVTCVVVDVSHEDPEVKF | Clone CH3C.35.23.3 with |
| | NWYVDGVEVHNAKTKPREEQYNSTYRVVSVLTVLHQDWLNGKEY | hole, LALAPG, and YTE |
| | KCKVSNKALGAPIEKTISKAKGQPREPQVYTLPPSRDELTKNQVSLS | mutations |
| | CAVKGFYPSDIAVEWESYGTEWVNYKTTPPVLDSDGSFFLVSKLTV | |
| | TKEEWQQGFVFSCSVMHEALHNHYTQKSLSLSPGK | |
| 145 | PCPAPELLGGPSVFLFPPKPKDTLMISRTPEVTCVVVDVSHEDPEVKF | Clone CH3C.35.23.4 with |
| | NWYVDGVEVHNAKTKPREEQYNSTYRVVSVLTVLHQDWLNGKEY | knob mutation |
| | KCKVSNKALPAPIEKTISKAKGQPREPQVYTLPPSRDELTKNQVSLW | |
| | CLVKGFYPSDIAVEWESYGTEWSNYKTTPPVLDSDGSFFLYSKLTVS | |
| | KEEWQQGFVFSCSVMHEALHNHYTQKSLSLSPGK | |
| 146 | PCPAPEAAGGPSVFLFPPKPKDTLMISRTPEVTCVVVDVSHEDPEVK | Clone CH3C.35.23.4 with |
| | FNWYVDGVEVHNAKTKPREEQYNSTYRVVSVLTVLHQDWLNGKE | knob and LALA mutations |
| | YKCKVSNKALPAPIEKTISKAKGQPREPQVYTLPPSRDELTKNQVSL | |
| | WCLVKGFYPSDIAVEWESYGTEWSNYKTTPPVLDSDGSFFLYSKLT | |
| | VSKEEWQQGFVFSCSVMHEALHNHYTQKSLSLSPGK | |
| 147 | PCPAPEAAGGPSVFLFPPKPKDTLMISRTPEVTCVVVDVSHEDPEVK | Clone CH3C.35.23.4 with |
| | FNWYVDGVEVHNAKTKPREEQYNSTYRVVSVLTVLHQDWLNGKE | knob and LALAPG |
| | YKCKVSNKALGAPIEKTISKAKGQPREPQVYTLPPSRDELTKNQVSL | mutations |
| | WCLVKGFYPSDIAVEWESYGTEWSNYKTTPPVLDSDGSFFLYSKLT | |
| | VSKEEWQQGFVFSCSVMHEALHNHYTQKSLSLSPGK | |
| 148 | PCPAPELLGGPSVFLFPPKPKDTLYITREPEVTCVVVDVSHEDPEVKF | Clone CH3C.35.23.4 with |
| | NWYVDGVEVHNAKTKPREEQYNSTYRVVSVLTVLHQDWLNGKEY | knob and YTE mutations |
| | KCKVSNKALPAPIEKTISKAKGQPREPQVYTLPPSRDELTKNQVSLW | |
| | CLVKGFYPSDIAVEWESYGTEWSNYKTTPPVLDSDGSFFLYSKLTVS | |
| | KEEWQQGFVFSCSVMHEALHNHYTQKSLSLSPGK | |
| 149 | PCPAPEAAGGPSVFLFPPKPKDTLYITREPEVTCVVVDVSHEDPEVKF | Clone CH3C.35.23.4 with |
| | NWYVDGVEVHNAKTKPREEQYNSTYRVVSVLTVLHQDWLNGKEY | knob, LALA, and YTE |
| | KCKVSNKALPAPIEKTISKAKGQPREPQVYTLPPSRDELTKNQVSLW | mutations |
| | CLVKGFYPSDIAVEWESYGTEWSNYKTTPPVLDSDGSFFLYSKLTVS | |
| | KEEWQQGFVFSCSVMHEALHNHYTQKSLSLSPGK | |
| 150 | PCPAPEAAGGPSVFLFPPKPKDTLYITREPEVTCVVVDVSHEDPEVKF | Clone CH3C.35.23.4 with |
| | NWYVDGVEVHNAKTKPREEQYNSTYRVVSVLTVLHQDWLNGKEY | knob, LALAPG, and YTE |
| | KCKVSNKALGAPIEKTISKAKGQPREPQVYTLPPSRDELTKNQVSLW | mutations |
| | CLVKGFYPSDIAVEWESYGTEWSNYKTTPPVLDSDGSFFLYSKLTVS | |
| | KEEWQQGFVFSCSVMHEALHNHYTQKSLSLSPGK | |
| 151 | PCPAPELLGGPSVFLFPPKPKDTLMISRTPEVTCVVVDVSHEDPEVKF | Clone CH3C.35.23.4 with |
| | NWYVDGVEVHNAKTKPREEQYNSTYRVVSVLTVLHQDWLNGKEY | hole mutations |
| | KCKVSNKALPAPIEKTISKAKGQPREPQVYTLPPSRDELTKNQVSLS | |
| | CAVKGFYPSDIAVEWESYGTEWSNYKTTPPVLDSDGSFFLVSKLTVS | |
| | KEEWQQGFVFSCSVMHEALHNHYTQKSLSLSPGK | |
| 152 | PCPAPEAAGGPSVFLFPPKPKDTLMISRTPEVTCVVVDVSHEDPEVK | Clone CH3C.35.23.4 with |
| | FNWYVDGVEVHNAKTKPREEQYNSTYRVVSVLTVLHQDWLNGKE | hole and LALA mutations |
| | YKCKVSNKALPAPIEKTISKAKGQPREPQVYTLPPSRDELTKNQVSL | |
| | SCAVKGFYPSDIAVEWESYGTEWSNYKTTPPVLDSDGSFFLVSKLTV | |
| | SKEEWQQGFVFSCSVMHEALHNHYTQKSLSLSPGK | |
| 153 | PCPAPEAAGGPSVFLFPPKPKDTLMISRTPEVTCVVVDVSHEDPEVK | Clone CH3C.35.23.4 with |
| | FNWYVDGVEVHNAKTKPREEQYNSTYRVVSVLTVLHQDWLNGKE | hole and LALAPG |
| | YKCKVSNKALGAPIEKTISKAKGQPREPQVYTLPPSRDELTKNQVSL | mutations |
| | SCAVKGFYPSDIAVEWESYGTEWSNYKTTPPVLDSDGSFFLVSKLTV | |
| | SKEEWQQGFVFSCSVMHEALHNHYTQKSLSLSPGK | |
| 154 | PCPAPELLGGPSVFLFPPKPKDTLYITREPEVTCVVVDVSHEDPEVKF | Clone CH3C.35.23.4 with |
| | NWYVDGVEVHNAKTKPREEQYNSTYRVVSVLTVLHQDWLNGKEY | hole and YTE mutations |
| | KCKVSNKALPAPIEKTISKAKGQPREPQVYTLPPSRDELTKNQVSLS | |
| | CAVKGFYPSDIAVEWESYGTEWSNYKTTPPVLDSDGSFFLVSKLTVS | |
| | KEEWQQGFVFSCSVMHEALHNHYTQKSLSLSPGK | |
| 155 | PCPAPEAAGGPSVFLFPPKPKDTLYITREPEVTCVVVDVSHEDPEVKF | Clone CH3C.35.23.4 with |
| | NWYVDGVEVHNAKTKPREEQYNSTYRVVSVLTVLHQDWLNGKEY | hole, LALA, and YTE |
| | KCKVSNKALPAPIEKTISKAKGQPREPQVYTLPPSRDELTKNQVSLS | mutations |
| | CAVKGFYPSDIAVEWESYGTEWSNYKTTPPVLDSDGSFFLVSKLTVS | |
| | KEEWQQGFVFSCSVMHEALHNHYTQKSLSLSPGK | |
| 156 | PCPAPEAAGGPSVFLFPPKPKDTLYITREPEVTCVVVDVSHEDPEVKF | Clone CH3C.35.23.4 with |
| | NWYVDGVEVHNAKTKPREEQYNSTYRVVSVLTVLHQDWLNGKEY | hole, LALAPG, and YTE |
| | KCKVSNKALGAPIEKTISKAKGQPREPQVYTLPPSRDELTKNQVSLS | mutations |
| | CAVKGFYPSDIAVEWESYGTEWSNYKTTPPVLDSDGSFFLVSKLTVS | |
| | KEEWQQGFVFSCSVMHEALHNHYTQKSLSLSPGK | |
| 157 | PCPAPELLGGPSVFLFPPKPKDTLMISRTPEVTCVVVDVSHEDPEVKF | Clone CH3C.35.21.17.2 |
| | NWYVDGVEVHNAKTKPREEQYNSTYRVVSVLTVLHQDWLNGKEY | with knob mutation |
| | KCKVSNKALPAPIEKTISKAKGQPREPQVYTLPPSRDELTKNQVSLW | |
| | CLVKGFYPSDIAVLWESYGTEWASYKTTPPVLDSDGSFFLYSKLTVT | |
| | KEEWQQGFVFSCSVMHEALHNHYTQKSLSLSPGK | |
| 158 | PCPAPEAAGGPSVFLFPPKPKDTLMISRTPEVTCVVVDVSHEDPEVK | Clone CH3C.35.21.17.2 |
| | FNWYVDGVEVHNAKTKPREEQYNSTYRVVSVLTVLHQDWLNGKE | with knob and LALA |
| | YKCKVSNKALPAPIEKTISKAKGQPREPQVYTLPPSRDELTKNQVSL | mutations |
| | WCLVKGFYPSDIAVLWESYGTEWASYKTTPPVLDSDGSFFLYSKLT | |
| | VTKEEWQQGFVFSCSVMHEALHNHYTQKSLSLSPGK | |
| 159 | PCPAPEAAGGPSVFLFPPKPKDTLMISRTPEVTCVVVDVSHEDPEVK | Clone CH3C.35.21.17.2 |
| | FNWYVDGVEVHNAKTKPREEQYNSTYRVVSVLTVLHQDWLNGKE | with knob and LALAPG |
| | YKCKVSNKALGAPIEKTISKAKGQPREPQVYTLPPSRDELTKNQVSL | mutations |
| | WCLVKGFYPSDIAVLWESYGTEWASYKTTPPVLDSDGSFFLYSKLT | |
| | VTKEEWQQGFVFSCSVMHEALHNHYTQKSLSLSPGK | |
| 160 | PCPAPELLGGPSVFLFPPKPKDTLYITREPEVTCVVVDVSHEDPEVKF | Clone CH3C.35.21.17.2 |
| | NWYVDGVEVHNAKTKPREEQYNSTYRVVSVLTVLHQDWLNGKEY | with knob and YTE |
| | KCKVSNKALPAPIEKTISKAKGQPREPQVYTLPPSRDELTKNQVSLW | mutations |
| | CLVKGFYPSDIAVLWESYGTEWASYKTTPPVLDSDGSFFLYSKLTVT | |
| | KEEWQQGFVFSCSVMHEALHNHYTQKSLSLSPGK | |
| 161 | PCPAPEAAGGPSVFLFPPKPKDTLYITREPEVTCVVVDVSHEDPEVKF | Clone CH3C.35.21.17.2 |
| | NWYVDGVEVHNAKTKPREEQYNSTYRVVSVLTVLHQDWLNGKEY | with knob, LALA, and |
| | KCKVSNKALPAPIEKTISKAKGQPREPQVYTLPPSRDELTKNQVSLW | YTE mutations |
| | CLVKGFYPSDIAVLWESYGTEWASYKTTPPVLDSDGSFFLYSKLTVT | |
| | KEEWQQGFVFSCSVMHEALHNHYTQKSLSLSPGK | |
| 162 | PCPAPEAAGGPSVFLFPPKPKDTLYITREPEVTCVVVDVSHEDPEVKF | Clone CH3C.35.21.17.2 |
| | NWYVDGVEVHNAKTKPREEQYNSTYRVVSVLTVLHQDWLNGKEY | with knob, LALAPG, and |
| | KCKVSNKALGAPIEKTISKAKGQPREPQVYTLPPSRDELTKNQVSLW | YTE mutations |
| | CLVKGFYPSDIAVLWESYGTEWASYKTTPPVLDSDGSFFLYSKLTVT | |
| | KEEWQQGFVFSCSVMHEALHNHYTQKSLSLSPGK | |
| 163 | PCPAPELLGGPSVFLFPPKPKDTLMISRTPEVTCVVVDVSHEDPEVKF | Clone CH3C.3521.17.2 |
| | NWYVDGVEVHNAKTKPREEQYNSTYRVVSVLTVLHQDWLNGKEY | with hole mutations |
| | KCKVSNKALPAPIEKTISKAKGQPREPQVYTLPPSRDELTKNQVSLS | |
| | CAVKGFYPSDIAVLWESYGTEWASYKTTPPVLDSDGSFFLVSKLTV | |
| | TKEEWQQGFVFSCSVMHEALHNHYTQKSLSLSPGK | |
| 164 | PCPAPEAAGGPSVFLFPPKPKDTLMISRTPEVTCVVVDVSHEDPEVK | Clone CH3C.35.21.17.2 |
| | FNWYVDGVEVHNAKTKPREEQYNSTYRVVSVLTVLHQDWLNGKE | with hole and LALA |
| | YKCKVSNKALPAPIEKTISKAKGQPREPQVYTLPPSRDELTKNQVSL | mutations |
| | SCAVKGFYPSDIAVLWESYGTEWASYKTTPPVLDSDGSFFLVSKLTV | |
| | TKEEWQQGFVFSCSVMHEALHNHYTQKSLSLSPGK | |
| 165 | PCPAPEAAGGPSVFLFPPKPKDTLMISRTPEVTCVVVDVSHEDPEVK | Clone CH3C.35.21.17.2 |
| | FNWYVDGVEVHNAKTKPREEQYNSTYRVVSVLTVLHQDWLNGKE | with hole and LALAPG |
| | YKCKVSNKALGAPIEKTISKAKGQPREPQVYTLPPSRDELTKNQVSL | mutations |
| | SCAVKGFYPSDIAVLWESYGTEWASYKTTPPVLDSDGSFFLVSKLTV | |
| | TKEEWQQGFVFSCSVMHEALHNHYTQKSLSLSPGK | |
| 166 | PCPAPELLGGPSVFLFPPKPKDTLYITREPEVTCVVVDVSHEDPEVKF | Clone CH3C.35.21.17.2 |
| | NWYVDGVEVHNAKTKPREEQYNSTYRVVSVLTVLHQDWLNGKEY | with hole and YTE |
| | KCKVSNKALPAPIEKTISKAKGQPREPQVYTLPPSRDELTKNQVSLS | mutations |
| | CAVKGFYPSDIAVLWESYGTEWASYKTTPPVLDSDGSFFLVSKLTV | |
| | TKEEWQQGFVFSCSVMHEALHNHYTQKSLSLSPGK | |
| 167 | PCPAPEAAGGPSVFLFPPKPKDTLYITREPEVTCVVVDVSHEDPEVKF | Clone CH3C.35.21.17.2 |
| | NWYVDGVEVHNAKTKPREEQYNSTYRVVSVLTVLHQDWLNGKEY | with hole, LALA, and |
| | KCKVSNKALPAPIEKTISKAKGQPREPQVYTLPPSRDELTKNQVSLS | YTE mutations |
| | CAVKGFYPSDIAVLWESYGTEWASYKTTPPVLDSDGSFFLVSKLTV | |
| | TKEEWQQGFVFSCSVMHEALHNHYTQKSLSLSPGK | |
| 168 | PCPAPEAAGGPSVFLFPPKPKDTLYITREPEVTCVVVDVSHEDPEVKF | Clone CH3C.35.21.17.2 |
| | NWYVDGVEVHNAKTKPREEQYNSTYRVVSVLTVLHQDWLNGKEY | with hole, LALAPG, and |
| | KCKVSNKALGAPIEKTISKAKGQPREPQVYTLPPSRDELTKNQVSLS | YTE mutations |
| | CAVKGFYPSDIAVLWESYGTEWASYKTTPPVLDSDGSFFLVSKLTV | |
| | TKEEWQQGFVFSCSVMHEALHNHYTQKSLSLSPGK | |
| 169 | PCPAPELLGGPSVFLFPPKPKDTLMISRTPEVTCVVVDVSHEDPEVKF | Clone CH3C.35.23 with |
| | NWYVDGVEVHNAKTKPREEQYNSTYRVVSVLTVLHQDWLNGKEY | knob mutation |
| | KCKVSNKALPAPIEKTISKAKGQPREPQVYTLPPSRDELTKNQVSLW | |
| | CLVKGFYPSDIAVEWESYGTEWSNYKTTPPVLDSDGSFFLYSKLTVT | |
| | KEEWQQGFVFSCSVMHEALHNHYTQKSLSLSPGK | |
| 170 | PCPAPEAAGGPSVFLFPPKPKDTLMISRTPEVTCVVVDVSHEDPEVK | Clone CH3C.35.23 with |
| | FNWYVDGVEVHNAKTKPREEQYNSTYRVVSVLTVLHQDWLNGKE | knob and LALA mutations |
| | YKCKVSNKALPAPIEKTISKAKGQPREPQVYTLPPSRDELTKNQVSL | |
| | WCLVKGFYPSDIAVEWESYGTEWSNYKTTPPVLDSDGSFFLYSKLT | |
| | VTKEEWQQGFVFSCSVMHEALHNHYTQKSLSLSPGK | |
| 171 | PCPAPEAAGGPSVFLFPPKPKDTLMISRTPEVTCVVVDVSHEDPEVK | Clone CH3C.35.23 with |
| | FNWYVDGVEVHNAKTKPREEQYNSTYRVVSVLTVLHQDWLNGKE | knob and LALAPG |
| | YKCKVSNKALGAPIEKTISKAKGQPREPQVYTLPPSRDELTKNQVSL | mutations |
| | WCLVKGFYPSDIAVEWESYGTEWSNYKTTPPVLDSDGSFFLYSKLT | |
| | VTKEEWQQGFVFSCSVMHEALHNHYTQKSLSLSPGK | |
| 172 | PCPAPELLGGPSVFLFPPKPKDTLYITREPEVTCVVVDVSHEDPEVKF | Clone CH3C.35.23 with |
| | NWYVDGVEVHNAKTKPREEQYNSTYRVVSVLTVLHQDWLNGKEY | knob and YTE mutations |
| | KCKVSNKALPAPIEKTISKAKGQPREPQVYTLPPSRDELTKNQVSLW | |
| | CLVKGFYPSDIAVEWESYGTEWSNYKTTPPVLDSDGSFFLYSKLTVT | |
| | KEEWQQGFVFSCSVMHEALHNHYTQKSLSLSPGK | |
| 173 | PCPAPEAAGGPSVFLFPPKPKDTLYITREPEVTCVVVDVSHEDPEVKF | Clone CH3C.35.23 with |
| | NWYVDGVEVHNAKTKPREEQYNSTYRVVSVLTVLHQDWLNGKEY | knob, LALA, and YTE |
| | KCKVSNKALPAPIEKTISKAKGQPREPQVYTLPPSRDELTKNQVSLW | mutations |
| | CLVKGFYPSDIAVEWESYGTEWSNYKTTPPVLDSDGSFFLYSKLTVT | |
| | KEEWQQGFVFSCSVMHEALHNHYTQKSLSLSPGK | |
| 174 | PCPAPEAAGGPSVFLFPPKPKDTLYITREPEVTCVVVDVSHEDPEVKF | Clone CH3C.35.23 with |
| | NWYVDGVEVHNAKTKPREEQYNSTYRVVSVLTVLHQDWLNGKEY | knob, LALAPG, and YTE |
| | KCKVSNKALGAPIEKTISKAKGQPREPQVYTLPPSRDELTKNQVSLW | mutations |
| | CLVKGFYPSDIAVEWESYGTEWSNYKTTPPVLDSDGSFFLYSKLTVT | |
| | KEEWQQGFVFSCSVMHEALHNHYTQKSLSLSPGK | |
| 175 | PCPAPELLGGPSVFLFPPKPKDTLMISRTPEVTCVVVDVSHEDPEVKF | Clone CH3C.35.23 with |
| | NWYVDGVEVHNAKTKPREEQYNSTYRVVSVLTVLHQDWLNGKEY | hole mutations |
| | KCKVSNKALPAPIEKTISKAKGQPREPQVYTLPPSRDELTKNQVSLS | |
| | CAVKGFYPSDIAVEWESYGTEWSNYKTTPPVLDSDGSFFLVSKLTV | |
| | TKEEWQQGFVFSCSVMHEALHNHYTQKSLSLSPGK | |
| 176 | PCPAPEAAGGPSVFLFPPKPKDTLMISRTPEVTCVVVDVSHEDPEVK | Clone CH3C.35.23 with |
| | FNWYVDGVEVHNAKTKPREEQYNSTYRVVSVLTVLHQDWLNGKE | hole and LALA mutations |
| | YKCKVSNKALPAPIEKTISKAKGQPREPQVYTLPPSRDELTKNQVSL | |
| | SCAVKGFYPSDIAVEWESYGTEWSNYKTTPPVLDSDGSFFLVSKLTV | |
| | TKEEWQQGFVFSCSVMHEALHNHYTQKSLSLSPGK | |
| 177 | PCPAPEAAGGPSVFLFPPKPKDTLMISRTPEVTCVVVDVSHEDPEVK | Clone CH3C.35.23 with |
| | FNWYVDGVEVHNAKTKPREEQYNSTYRVVSVLTVLHQDWLNGKE | hole and LALAPG |
| | YKCKVSNKALGAPIEKTISKAKGQPREPQVYTLPPSRDELTKNQVSL | mutations |
| | SCAVKGFYPSDIAVEWESYGTEWSNYKTTPPVLDSDGSFFLVSKLTV | |
| | TKEEWQQGFVFSCSVMHEALHNHYTQKSLSLSPGK | |
| 178 | PCPAPELLGGPSVFLFPPKPKDTLYITREPEVTCVVVDVSHEDPEVKF | Clone CH3C.35.23 with |
| | NWYVDGVEVHNAKTKPREEQYNSTYRVVSVLTVLHQDWLNGKEY | hole and YTE mutations |
| | KCKVSNKALPAPIEKTISKAKGQPREPQVYTLPPSRDELTKNQVSLS | |
| | CAVKGFYPSDIAVEWESYGTEWSNYKTTPPVLDSDGSFFLVSKLTV | |
| | TKEEWQQGFVFSCSVMHEALHNHYTQKSLSLSPGK | |
| 179 | PCPAPEAAGGPSVFLFPPKPKDTLYITREPEVTCVVVDVSHEDPEVKF | Clone CH3C.35.23 with |
| | NWYVDGVEVHNAKTKPREEQYNSTYRVVSVLTVLHQDWLNGKEY | hole, LALA, and YTE |
| | KCKVSNKALPAPIEKTISKAKGQPREPQVYTLPPSRDELTKNQVSLS | mutations |
| | CAVKGFYPSDIAVEWESYGTEWSNYKTTPPVLDSDGSFFLVSKLTV | |
| | TKEEWQQGFVFSCSVMHEALHNHYTQKSLSLSPGK | |
| 180 | PCPAPEAAGGPSVFLFPPKPKDTLYITREPEVTCVVVDVSHEDPEVKF | Clone CH3C.35.23 with |
| | NWYVDGVEVHNAKTKPREEQYNSTYRVVSVLTVLHQDWLNGKEY | hole, LALAPG, and YTE |
| | KCKVSNKALGAPIEKTISKAKGQPREPQVYTLPPSRDELTKNQVSLS | mutations |
| | CAVKGFYPSDIAVEWESYGTEWSNYKTTPPVLDSDGSFFLVSKLTV | |
| | TKEEWQQGFVFSCSVMHEALHNHYTQKSLSLSPGK | |
| 181 | METDTLLLWVLLLWVPGSTGDKTHTCPPCPAPEAAGGPSVFLFPPK | Expressed CH3C.35 Fc |
| | PKDTLYITREPEVTCVVVDVSHEDPEVKFNWYVDGVEVHNAKTKP | sequence |
| | REEQYNSTYRVVSVLTVLHQDWLNGKEYKCKVSNKALGAPIEKTIS | |
| | KAKGQPREPQVYTLPPSRDELTKNQVSLTCLVKGFYPSDIAVEWES | |
| | YGTEWSSYKTTPPVLDSDGSFFLYSKLTVTKSEWQQGFVFSCSVMH | |
| | EALHNHYTQKSLSLSPGK | |
| 182 | PCPAPELLGGPSVFLFPPKPKDTLMISRTPEVTCVVVDVSHEDPEVKF | Clone CH3C.18.3.4-1 |
| | NWYVDGVEVHNAKTKPREEQYNSTYRVVSVLTVLHQDWLNGKEY | (CH3C.3.4-1) |
| | KCKVSNKALPAPIEKTISKAKGQPREPQVYTLPPSRDELTKNQVSLT | |
| | CLVKGFYPSDIAVEWESWGFVWSTYKTTPPVLDSDGSFFLYSKLTV | |
| | PKSNWQQGFVFSCSVMHEALHNHYTQKSLSLSPGK | |
| 183 | PCPAPELLGGPSVFLFPPKPKDTLMISRTPEVTCVVVDVSHEDPEVKF | Clone CH3C.18.3.4-19 |
| | NWYVDGVEVHNAKTKPREEQYNSTYRVVSVLTVLHQDWLNGKEY | (CH3C.3.4-19) |
| | KCKVSNKALPAPIEKTISKAKGQPREPQVYTLPPSRDELTKNQVSLT | |
| | CLVKGFYPSDIAVEWESWGHVWSTYKTTPPVLDSDGSFFLYSKLTV | |
| | PKSNWQQGYVFSCSVMHEALHNHYTQKSLSLSPGK | |
| 184 | PCPAPELLGGPSVFLFPPKPKDTLMISRTPEVTCVVVDVSHEDPEVKF | Clone CH3C.18.3.2-3 |
| | NWYVDGVEVHNAKTKPREEQYNSTYRVVSVLTVLHQDWLNGKEY | (CH3C.3.2-3) |
| | KCKVSNKALPAPIEKTISKAKGQPREPQVYTLPPSRDELTKNQVSLT | |
| | CLVKGFYPSDIAVEWESLGHVWVEQKTTPPVLDSDGSFFLYSKLTV | |
| | PKSTWQQGWVFSCSVMHEALHNHYTQKSLSLSPGK | |
| 185 | PCPAPELLGGPSVFLFPPKPKDTLMISRTPEVTCVVVDVSHEDPEVKF | Clone CH3C.18.3.2-14 |
| | NWYVDGVEVHNAKTKPREEQYNSTYRVVSVLTVLHQDWLNGKEY | (CH3C.3.2-14) |
| | KCKVSNKALPAPIEKTISKAKGQPREPQVYTLPPSRDELTKNQVSLT | |
| | CLVKGFYPSDIAVEWESLGHVWVGVKTTPPVLDSDGSFFLYSKLTV | |
| | PKSTWQQGWVFSCSVMHEALHNHYTQKSLSLSPGK | |
| 186 | PCPAPELLGGPSVFLFPPKPKDTLMISRTPEVTCVVVDVSHEDPEVKF | Clone CH3C.18.3.2-24 |
| | NWYVDGVEVHNAKTKPREEQYNSTYRVVSVLTVLHQDWLNGKEY | (CH3C.3.2-24) |
| | KCKVSNKALPAPIEKTISKAKGQPREPQVYTLPPSRDELTKNQVSLT | |
| | CLVKGFYPSDIAVEWESLGHVWVHTKTTPPVLDSDGSFFLYSKLTV | |
| | PKSTWQQGWVFSCSVMHEALHNHYTQKSLSLSPGK | |
| 187 | PCPAPELLGGPSVFLFPPKPKDTLMISRTPEVTCVVVDVSHEDPEVKF | Clone CH3C.18.3.4-26 |
| | NWYVDGVEVHNAKTKPREEQYNSTYRVVSVLTVLHQDWLNGKEY | (CH3C.3.4-26) |
| | KCKVSNKALPAPIEKTISKAKGQPREPQVYTLPPSRDELTKNQVSLT | |
| | CLVKGFYPSDIAVEWESWGTVWGTYKTTPPVLDSDGSFFLYSKLTV | |
| | PKSNWQQGYVFSCSVMHEALHNHYTQKSLSLSPGK | |
| 188 | PCPAPELLGGPSVFLFPPKPKDTLMISRTPEVTCVVVDVSHEDPEVKF | Clone CH3C.18.3.2-17 |
| | NWYVDGVEVHNAKTKPREEQYNSTYRVVSVLTVLHQDWLNGKEY | (CH3C.3.2-17) |
| | KCKVSNKALPAPIEKTISKAKGQPREPQVYTLPPSRDELTKNQVSLT | |
| | CLVKGFYPSDIAVEWESLGHVWVGTKTTPPVLDSDGSFFLYSKLTV | |
| | PKSTWQQGWVFSCSVMHEALHNHYTQKSLSLSPGK | |
| 189 | PCPAPELLGGPSVFLFPPKPKDTLMISRTPEVTCVVVDVSHEDPEVKF | Clone CH3C.35.20.1.1 |
| | NWYVDGVEVHNAKTKPREEQYNSTYRVVSVLTVLHQDWLNGKEY | |
| | KCKVSNKALPAPIEKTISKAKGQPREPQVYTLPPSRDELTKNQVSLT | |
| | CLVKGFYPSDIAVEWESFGTEWSSYKTTPPVLDSDGSFFLYSKLTVS | |
| | KEEWQQGFVFSCSVMHEALHNHYTQKSLSLSPGK | |
| 190 | PCPAPELLGGPSVFLFPPKPKDTLMISRTPEVTCVVVDVSHEDPEVKF | Clone CH3C.35.23.2.1 |
| | NWYVDGVEVHNAKTKPREEQYNSTYRVVSVLTVLHQDWLNGKEY | |
| | KCKVSNKALPAPIEKTISKAKGQPREPQVYTLPPSRDELTKNQVSLT | |
| | CLVKGFYPSDIAVEWESYGTEWANYKTTPPVLDSDGSFFLYSKLTV | |
| | SKSEWQQGFVFSCSVMHEALHNHYTQKSLSLSPGK | |
| 191 | PCPAPELLGGPSVFLFPPKPKDTLMISRTPEVTCVVVDVSHEDPEVKF | Clone CH3C.35.23.1.1 |
| | NWYVDGVEVHNAKTKPREEQYNSTYRVVSVLTVLHQDWLNGKEY | |
| | KCKVSNKALPAPIEKTISKAKGQPREPQVYTLPPSRDELTKNQVSLT | |
| | CLVKGFYPSDIAVEWESFGTEWSNYKTTPPVLDSDGSFFLYSKLTVS | |
| | KEEWQQGFVFSCSVMHEALHNHYTQKSLSLSPGK | |
| 192 | PCPAPELLGGPSVFLFPPKPKDTLMISRTPEVTCVVVDVSHEDPEVKF | Clone CH3C.35.S413 |
| | NWYVDGVEVHNAKTKPREEQYNSTYRVVSVLTVLHQDWLNGKEY | |
| | KCKVSNKALPAPIEKTISKAKGQPREPQVYTLPPSRDELTKNQVSLT | |
| | CLVKGFYPSDIAVEWESYGTEWSSYKTTPPVLDSDGSFFLYSKLTVS | |
| | KSEWQQGFVFSCSVMHEALHNHYTQKSLSLSPGK | |
| 193 | PCPAPELLGGPSVFLFPPKPKDTLMISRTPEVTCVVVDVSHEDPEVKF | Clone CH3C.35.23.3.1 |
| | NWYVDGVEVHNAKTKPREEQYNSTYRVVSVLTVLHQDWLNGKEY | |
| | KCKVSNKALPAPIEKTISKAKGQPREPQVYTLPPSRDELTKNQVSLT | |
| | CLVKGFYPSDIAVEWESYGTEWVNYKTTPPVLDSDGSFFLYSKLTV | |
| | SKEEWQQGFVFSCSVMHEALHNHYTQKSLSLSPGK | |
| 194 | PCPAPELLGGPSVFLFPPKPKDTLMISRTPEVTCVVVDVSHEDPEVKF | Clone CH3C.35.N390.1 |
| | NWYVDGVEVHNAKTKPREEQYNSTYRVVSVLTVLHQDWLNGKEY | |
| | KCKVSNKALPAPIEKTISKAKGQPREPQVYTLPPSRDELTKNQVSLT | |
| | CLVKGFYPSDIAVEWESYGTEWSNYKTTPPVLDSDGSFFLYSKLTVS | |
| | KSEWQQGFVFSCSVMHEALHNHYTQKSLSLSPGK | |
| 195 | PCPAPELLGGPSVFLFPPKPKDTLMISRTPEVTCVVVDVSHEDPEVKF | Clone CH3C.35.23.6.1 |
| | NWYVDGVEVHNAKTKPREEQYNSTYRVVSVLTVLHQDWLNGKEY | |
| | KCKVSNKALPAPIEKTISKAKGQPREPQVYTLPPSRDELTKNQVSLT | |
| | CLVKGFYPSDIAVEWESFGTEWVNYKTTPPVLDSDGSFFLYSKLTVS | |
| | KEEWQQGFVFSCSVMHEALHNHYTQKSLSLSPGK | |
| 196 | PCPAPELLGGPSVFLFPPKPKDTLMISRTPEVTCVVVDVSHEDPEVKF | Clone CH3C.35.21 with |
| | NWYVDGVEVHNAKTKPREEQYNSTYRVVSVLTVLHQDWLNGKEY | knob mutation |
| | KCKVSNKALPAPIEKTISKAKGQPREPQVYTLPPSRDELTKNQVSLW | |
| | CLVKGFYPSDIAVWWESYGTEWSSYKTTPPVLDSDGSFFLYSKLTV | |
| | TKEEWQQGFVFSCSVMHEALHNHYTQKSLSLSPGK | |
| 197 | PCPAPEAAGGPSVFLFPPKPKDTLMISRTPEVTCVVVDVSHEDPEVK | Clone CH3C.35.21 with |
| | FNWYVDGVEVHNAKTKPREEQYNSTYRVVSVLTVLHQDWLNGKE | knob and LALA mutations |
| | YKCKVSNKALPAPIEKTISKAKGQPREPQVYTLPPSRDELTKNQVSL | |
| | WCLVKGFYPSDIAVWWESYGTEWSSYKTTPPVLDSDGSFFLYSKLT | |
| | VTKEEWQQGFVFSCSVMHEALHNHYTQKSLSLSPGK | |
| 198 | PCPAPEAAGGPSVFLFPPKPKDTLMISRTPEVTCVVVDVSHEDPEVK | Clone CH3C.35.21 with |
| | FNWYVDGVEVHNAKTKPREEQYNSTYRVVSVLTVLHQDWLNGKE | knob and LALAPG |
| | YKCKVSNKALGAPIEKTISKAKGQPREPQVYTLPPSRDELTKNQVSL | mutations |
| | WCLVKGFYPSDIAVWWESYGTEWSSYKTTPPVLDSDGSFFLYSKLT | |
| | VTKEEWQQGFVFSCSVMHEALHNHYTQKSLSLSPGK | |
| 199 | PCPAPELLGGPSVFLFPPKPKDTLYITREPEVTCVVVDVSHEDPEVKF | Clone CH3C.35.21 with |
| | NWYVDGVEVHNAKTKPREEQYNSTYRVVSVLTVLHQDWLNGKEY | knob and YTE mutations |
| | KCKVSNKALPAPIEKTISKAKGQPREPQVYTLPPSRDELTKNQVSLW | |
| | CLVKGFYPSDIAVWWESYGTEWSSYKTTPPVLDSDGSFFLYSKLTV | |
| | TKEEWQQGFVFSCSVMHEALHNHYTQKSLSLSPGK | |
| 200 | PCPAPEAAGGPSVFLFPPKPKDTLYITREPEVTCVVVDVSHEDPEVKF | Clone CH3C.35.21 with |
| | NWYVDGVEVHNAKTKPREEQYNSTYRVVSVLTVLHQDWLNGKEY | knob, LALA, and YTE |
| | KCKVSNKALPAPIEKTISKAKGQPREPQVYTLPPSRDELTKNQVSLW | mutations |
| | CLVKGFYPSDIAVWWESYGTEWSSYKTTPPVLDSDGSFFLYSKLTV | |
| | TKEEWQQGFVFSCSVMHEALHNHYTQKSLSLSPGK | |
| 201 | PCPAPEAAGGPSVFLFPPKPKDTLYITREPEVTCVVVDVSHEDPEVKF | Clone CH3C.35.21 with |
| | NWYVDGVEVHNAKTKPREEQYNSTYRVVSVLTVLHQDWLNGKEY | knob, LALAPG, and YTE |
| | KCKVSNKALGAPIEKTISKAKGQPREPQVYTLPPSRDELTKNQVSLW | mutations |
| | CLVKGFYPSDIAVWWESYGTEWSSYKTTPPVLDSDGSFFLYSKLTV | |
| | TKEEWQQGFVFSCSVMHEALHNHYTQKSLSLSPGK | |
| 202 | PCPAPELLGGPSVFLFPPKPKDTLMISRTPEVTCVVVDVSHEDPEVKF | Clone CH3C.35.21 with |
| | NWYVDGVEVHNAKTKPREEQYNSTYRVVSVLTVLHQDWLNGKEY | hole mutations |
| | KCKVSNKALPAPIEKTISKAKGQPREPQVYTLPPSRDELTKNQVSLS | |
| | CAVKGFYPSDIAVWWESYGTEWSSYKTTPPVLDSDGSFFLVSKLTV | |
| | TKEEWQQGFVFSCSVMHEALHNHYTQKSLSLSPGK | |
| 203 | PCPAPEAAGGPSVFLFPPKPKDTLMISRTPEVTCVVVDVSHEDPEVK | Clone CH3C.35.21 with |
| | FNWYVDGVEVHNAKTKPREEQYNSTYRVVSVLTVLHQDWLNGKE | hole and LALA mutations |
| | YKCKVSNKALPAPIEKTISKAKGQPREPQVYTLPPSRDELTKNQVSL | |
| | SCAVKGFYPSDIAVWWESYGTEWSSYKTTPPVLDSDGSFFLVSKLT | |
| | VTKEEWQQGFVFSCSVMHEALHNHYTQKSLSLSPGK | |
| 204 | PCPAPEAAGGPSVFLFPPKPKDTLMISRTPEVTCVVVDVSHEDPEVK | Clone CH3C.35.21 with |
| | FNWYVDGVEVHNAKTKPREEQYNSTYRVVSVLTVLHQDWLNGKE | hole and LALAPG |
| | YKCKVSNKALGAPIEKTISKAKGQPREPQVYTLPPSRDELTKNQVSL | mutations |
| | SCAVKGFYPSDIAVWWESYGTEWSSYKTTPPVLDSDGSFFLVSKLT | |
| | VTKEEWQQGFVFSCSVMHEALHNHYTQKSLSLSPGK | |
| 205 | PCPAPELLGGPSVFLFPPKPKDTLYITREPEVTCVVVDVSHEDPEVKF | Clone CH3C.35.21 with |
| | NWYVDGVEVHNAKTKPREEQYNSTYRVVSVLTVLHQDWLNGKEY | hole and YTE mutations |
| | KCKVSNKALPAPIEKTISKAKGQPREPQVYTLPPSRDELTKNQVSLS | |
| | CAVKGFYPSDIAVWWESYGTEWSSYKTTPPVLDSDGSFFLVSKLTV | |
| | TKEEWQQGFVFSCSVMHEALHNHYTQKSLSLSPGK | |
| 206 | PCPAPEAAGGPSVFLFPPKPKDTLYITREPEVTCVVVDVSHEDPEVKF | Clone CH3C.35.21 with |
| | NWYVDGVEVHNAKTKPREEQYNSTYRVVSVLTVLHQDWLNGKEY | hole, LALA, and YTE |
| | KCKVSNKALPAPIEKTISKAKGQPREPQVYTLPPSRDELTKNQVSLS | mutations |
| | CAVKGFYPSDIAVWWESYGTEWSSYKTTPPVLDSDGSFFLVSKLTV | |
| | TKEEWQQGFVFSCSVMHEALHNHYTQKSLSLSPGK | |
| 207 | PCPAPEAAGGPSVFLFPPKPKDTLYITREPEVTCVVVDVSHEDPEVKF | Clone CH3C.35.21 with |
| | NWYVDGVEVHNAKTKPREEQYNSTYRVVSVLTVLHQDWLNGKEY | hole, LALAPG, and YTE |
| | KCKVSNKALGAPIEKTISKAKGQPREPQVYTLPPSRDELTKNQVSLS | mutations |
| | CAVKGFYPSDIAVWWESYGTEWSSYKTTPPVLDSDGSFFLVSKLTV | |
| | TKEEWQQGFVFSCSVMHEALHNHYTQKSLSLSPGK | |
| 208 | PCPAPELLGGPSVFLFPPKPKDTLMISRTPEVTCVVVDVSHEDPEVKF | Clone CH3C.35.20.1.1 |
| | NWYVDGVEVHNAKTKPREEQYNSTYRVVSVLTVLHQDWLNGKEY | with knob mutation |
| | KCKVSNKALPAPIEKTISKAKGQPREPQVYTLPPSRDELTKNQVSLW | |
| | CLVKGFYPSDIAVEWESFGTEWSSYKTTPPVLDSDGSFFLYSKLTVS | |
| | KEEWQQGFVFSCSVMHEALHNHYTQKSLSLSPGK | |
| 209 | PCPAPEAAGGPSVFLFPPKPKDTLMISRTPEVTCVVVDVSHEDPEVK | Clone CH3C.35.20.1.1 |
| | FNWYVDGVEVHNAKTKPREEQYNSTYRVVSVLTVLHQDWLNGKE | with knob and LALA |
| | YKCKVSNKALPAPIEKTISKAKGQPREPQVYTLPPSRDELTKNQVSL | mutations |
| | WCLVKGFYPSDIAVEWESFGTEWSSYKTTPPVLDSDGSFFLYSKLTV | |
| | SKEEWQQGFVFSCSVMHEALHNHYTQKSLSLSPGK | |
| 210 | PCPAPEAAGGPSVFLFPPKPKDTLMISRTPEVTCVVVDVSHEDPEVK | Clone CH3C.35.20.1.1 |
| | FNWYVDGVEVHNAKTKPREEQYNSTYRVVSVLTVLHQDWLNGKE | with knob and LALAPG |
| | YKCKVSNKALGAPIEKTISKAKGQPREPQVYTLPPSRDELTKNQVSL | mutations |
| | WCLVKGFYPSDIAVEWESFGTEWSSYKTTPPVLDSDGSFFLYSKLTV | |
| | SKEEWQQGFVFSCSVMHEALHNHYTQKSLSLSPGK | |
| 211 | PCPAPELLGGPSVFLFPPKPKDTLYITREPEVTCVVVDVSHEDPEVKF | Clone CH3C.35.20.1.1 |
| | NWYVDGVEVHNAKTKPREEQYNSTYRVVSVLTVLHQDWLNGKEY | with knob and YTE |
| | KCKVSNKALPAPIEKTISKAKGQPREPQVYTLPPSRDELTKNQVSLW | mutations |
| | CLVKGFYPSDIAVEWESFGTEWSSYKTTPPVLDSDGSFFLYSKLTVS | |
| | KEEWQQGFVFSCSVMHEALHNHYTQKSLSLSPGK | |
| 212 | PCPAPEAAGGPSVFLFPPKPKDTLYITREPEVTCVVVDVSHEDPEVKF | Clone CH3C.35.20.1.1 |
| | NWYVDGVEVHNAKTKPREEQYNSTYRVVSVLTVLHQDWLNGKEY | with knob, LALA, and |
| | KCKVSNKALPAPIEKTISKAKGQPREPQVYTLPPSRDELTKNQVSLW | YTE mutations |
| | CLVKGFYPSDIAVEWESFGTEWSSYKTTPPVLDSDGSFFLYSKLTVS | |
| | KEEWQQGFVFSCSVMHEALHNHYTQKSLSLSPGK | |
| 213 | PCPAPEAAGGPSVFLFPPKPKDTLYITREPEVTCVVVDVSHEDPEVKF | Clone CH3C.35.20.1.1 |
| | NWYVDGVEVHNAKTKPREEQYNSTYRVVSVLTVLHQDWLNGKEY | with knob, LALAPG, and |
| | KCKVSNKALGAPIEKTISKAKGQPREPQVYTLPPSRDELTKNQVSLW | YTE mutations |
| | CLVKGFYPSDIAVEWESFGTEWSSYKTTPPVLDSDGSFFLYSKLTVS | |
| | KEEWQQGFVFSCSVMHEALHNHYTQKSLSLSPGK | |
| 214 | PCPAPELLGGPSVFLFPPKPKDTLMISRTPEVTCVVVDVSHEDPEVKF | Clone CH3C.35.20.1.1 |
| | NWYVDGVEVHNAKTKPREEQYNSTYRVVSVLTVLHQDWLNGKEY | with hole mutations |
| | KCKVSNKALPAPIEKTISKAKGQPREPQVYTLPPSRDELTKNQVSLS | |
| | CAVKGFYPSDIAVEWESFGTEWSSYKTTPPVLDSDGSFFLVSKLTVS | |
| | KEEWQQGFVFSCSVMHEALHNHYTQKSLSLSPGK | |
| 215 | PCPAPEAAGGPSVFLFPPKPKDTLMISRTPEVTCVVVDVSHEDPEVK | Clone CH3C.35.20.1.1 |
| | FNWYVDGVEVHNAKTKPREEQYNSTYRVVSVLTVLHQDWLNGKE | with hole and LALA |
| | YKCKVSNKALPAPIEKTISKAKGQPREPQVYTLPPSRDELTKNQVSL | mutations |
| | SCAVKGFYPSDIAVEWESFGTEWSSYKTTPPVLDSDGSFFLVSKLTV | |
| | SKEEWQQGFVFSCSVMHEALHNHYTQKSLSLSPGK | |
| 216 | PCPAPEAAGGPSVFLFPPKPKDTLMISRTPEVTCVVVDVSHEDPEVK | Clone CH3C.35.20.1.1 |
| | FNWYVDGVEVHNAKTKPREEQYNSTYRVVSVLTVLHQDWLNGKE | with hole and LALAPG |
| | YKCKVSNKALGAPIEKTISKAKGQPREPQVYTLPPSRDELTKNQVSL | mutations |
| | SCAVKGFYPSDIAVEWESFGTEWSSYKTTPPVLDSDGSFFLVSKLTV | |
| | SKEEWQQGFVFSCSVMHEALHNHYTQKSLSLSPGK | |
| 217 | PCPAPELLGGPSVFLFPPKPKDTLYITREPEVTCVVVDVSHEDPEVKF | Clone CH3C.35.20.1.1 |
| | NWYVDGVEVHNAKTKPREEQYNSTYRVVSVLTVLHQDWLNGKEY | with hole and YTE |
| | KCKVSNKALPAPIEKTISKAKGQPREPQVYTLPPSRDELTKNQVSLS | mutations |
| | CAVKGFYPSDIAVEWESFGTEWSSYKTTPPVLDSDGSFFLVSKLTVS | |
| | KEEWQQGFVFSCSVMHEALHNHYTQKSLSLSPGK | |
| 218 | PCPAPEAAGGPSVFLFPPKPKDTLYITREPEVTCVVVDVSHEDPEVKF | Clone CH3C.35.20.1.1 |
| | NWYVDGVEVHNAKTKPREEQYNSTYRVVSVLTVLHQDWLNGKEY | with hole, LALA, and |
| | KCKVSNKALPAPIEKTISKAKGQPREPQVYTLPPSRDELTKNQVSLS | YTE mutations |
| | CAVKGFYPSDIAVEWESFGTEWSSYKTTPPVLDSDGSFFLVSKLTVS | |
| | KEEWQQGFVFSCSVMHEALHNHYTQKSLSLSPGK | |
| 219 | PCPAPEAAGGPSVFLFPPKPKDTLYITREPEVTCVVVDVSHEDPEVKF | Clone CH3C.35.20.1.1 |
| | NWYVDGVEVHNAKTKPREEQYNSTYRVVSVLTVLHQDWLNGKEY | with hole, LALAPG, and |
| | KCKVSNKALGAPIEKTISKAKGQPREPQVYTLPPSRDELTKNQVSLS | YTE mutations |
| | CAVKGFYPSDIAVEWESFGTEWSSYKTTPPVLDSDGSFFLVSKLTVS | |
| | KEEWQQGFVFSCSVMHEALHNHYTQKSLSLSPGK | |
| 220 | PCPAPELLGGPSVFLFPPKPKDTLMISRTPEVTCVVVDVSHEDPEVKF | Clone CH3C.35.23.2.1 |
| | NWYVDGVEVHNAKTKPREEQYNSTYRVVSVLTVLHQDWLNGKEY | with knob mutation |
| | KCKVSNKALPAPIEKTISKAKGQPREPQVYTLPPSRDELTKNQVSLW | |
| | CLVKGFYPSDIAVEWESYGTEWANYKTTPPVLDSDGSFFLYSKLTV | |
| | SKSEWQQGFVFSCSVMHEALHNHYTQKSLSLSPGK | |
| 221 | PCPAPEAAGGPSVFLFPPKPKDTLMISRTPEVTCVVVDVSHEDPEVK | Clone CH3C.35.23.2.1 |
| | FNWYVDGVEVHNAKTKPREEQYNSTYRVVSVLTVLHQDWLNGKE | with knob and LALA |
| | YKCKVSNKALPAPIEKTISKAKGQPREPQVYTLPPSRDELTKNQVSL | mutations |
| | WCLVKGFYPSDIAVEWESYGTEWANYKTTPPVLDSDGSFFLYSKLT | |
| | VSKSEWQQGFVFSCSVMHEALHNHYTQKSLSLSPGK | |
| 222 | PCPAPEAAGGPSVFLFPPKPKDTLMISRTPEVTCVVVDVSHEDPEVK | Clone CH3C.35.23.2.1 |
| | FNWYVDGVEVHNAKTKPREEQYNSTYRVVSVLTVLHQDWLNGKE | with knob and LALAPG |
| | YKCKVSNKALGAPIEKTISKAKGQPREPQVYTLPPSRDELTKNQVSL | mutations |
| | WCLVKGFYPSDIAVEWESYGTEWANYKTTPPVLDSDGSFFLYSKLT | |
| | VSKSEWQQGFVFSCSVMHEALHNHYTQKSLSLSPGK | |
| 223 | PCPAPELLGGPSVFLFPPKPKDTLYITREPEVTCVVVDVSHEDPEVKF | Clone CH3C.35.23.2.1 |
| | NWYVDGVEVHNAKTKPREEQYNSTYRVVSVLTVLHQDWLNGKEY | with knob and YTE |
| | KCKVSNKALPAPIEKTISKAKGQPREPQVYTLPPSRDELTKNQVSLW | mutations |
| | CLVKGFYPSDIAVEWESYGTEWANYKTTPPVLDSDGSFFLYSKLTV | |
| | SKSEWQQGFVFSCSVMHEALHNHYTQKSLSLSPGK | |
| 224 | PCPAPEAAGGPSVFLFPPKPKDTLYITREPEVTCVVVDVSHEDPEVKF | Clone CH3C.35.23.2.1 |
| | NWYVDGVEVHNAKTKPREEQYNSTYRVVSVLTVLHQDWLNGKEY | with knob, LALA, and |
| | KCKVSNKALPAPIEKTISKAKGQPREPQVYTLPPSRDELTKNQVSLW | YTE mutations |
| | CLVKGFYPSDIAVEWESYGTEWANYKTTPPVLDSDGSFFLYSKLTV | |
| | SKSEWQQGFVFSCSVMHEALHNHYTQKSLSLSPGK | |
| 225 | PCPAPEAAGGPSVFLFPPKPKDTLYITREPEVTCVVVDVSHEDPEVKF | Clone CH3C.35.23.2.1 |
| | NWYVDGVEVHNAKTKPREEQYNSTYRVVSVLTVLHQDWLNGKEY | with knob, LALAPG, and |
| | KCKVSNKALGAPIEKTISKAKGQPREPQVYTLPPSRDELTKNQVSLW | YTE mutations |
| | CLVKGFYPSDIAVEWESYGTEWANYKTTPPVLDSDGSFFLYSKLTV | |
| | SKSEWQQGFVFSCSVMHEALHNHYTQKSLSLSPGK | |
| 226 | PCPAPELLGGPSVFLFPPKPKDTLMISRTPEVTCVVVDVSHEDPEVKF | Clone CH3C.3523.2.1 |
| | NWYVDGVEVHNAKTKPREEQYNSTYRVVSVLTVLHQDWLNGKEY | with hole mutations |
| | KCKVSNKALPAPIEKTISKAKGQPREPQVYTLPPSRDELTKNQVSLS | |
| | CAVKGFYPSDIAVEWESYGTEWANYKTTPPVLDSDGSFFLVSKLTV | |
| | SKSEWQQGFVFSCSVMHEALHNHYTQKSLSLSPGK | |
| 227 | PCPAPEAAGGPSVFLFPPKPKDTLMISRTPEVTCVVVDVSHEDPEVK | Clone CH3C.35.23.2.1 |
| | FNWYVDGVEVHNAKTKPREEQYNSTYRVVSVLTVLHQDWLNGKE | with hole and LALA |
| | YKCKVSNKALPAPIEKTISKAKGQPREPQVYTLPPSRDELTKNQVSL | mutations |
| | SCAVKGFYPSDIAVEWESYGTEWANYKTTPPVLDSDGSFFLVSKLT | |
| | VSKSEWQQGFVFSCSVMHEALHNHYTQKSLSLSPGK | |
| 228 | PCPAPEAAGGPSVFLFPPKPKDTLMISRTPEVTCVVVDVSHEDPEVK | Clone CH3C.35.23.2.1 |
| | FNWYVDGVEVHNAKTKPREEQYNSTYRVVSVLTVLHQDWLNGKE | with hole and LALAPG |
| | YKCKVSNKALGAPIEKTISKAKGQPREPQVYTLPPSRDELTKNQVSL | mutations |
| | SCAVKGFYPSDIAVEWESYGTEWANYKTTPPVLDSDGSFFLVSKLT | |
| | VSKSEWQQGFVFSCSVMHEALHNHYTQKSLSLSPGK | |
| 229 | PCPAPELLGGPSVFLFPPKPKDTLYITREPEVTCVVVDVSHEDPEVKF | Clone CH3C.35.23.2.1 |
| | NWYVDGVEVHNAKTKPREEQYNSTYRVVSVLTVLHQDWLNGKEY | with hole and YTE |
| | KCKVSNKALPAPIEKTISKAKGQPREPQVYTLPPSRDELTKNQVSLS | mutations |
| | CAVKGFYPSDIAVEWESYGTEWANYKTTPPVLDSDGSFFLVSKLTV | |
| | SKSEWQQGFVFSCSVMHEALHNHYTQKSLSLSPGK | |
| 230 | PCPAPEAAGGPSVFLFPPKPKDTLYITREPEVTCVVVDVSHEDPEVKF | Clone CH3C.35.23.2.1 |
| | NWYVDGVEVHNAKTKPREEQYNSTYRVVSVLTVLHQDWLNGKEY | with hole, LALA, and |
| | KCKVSNKALPAPIEKTISKAKGQPREPQVYTLPPSRDELTKNQVSLS | YTE mutations |
| | CAVKGFYPSDIAVEWESYGTEWANYKTTPPVLDSDGSFFLVSKLTV | |
| | SKSEWQQGFVFSCSVMHEALHNHYTQKSLSLSPGK | |
| 231 | PCPAPEAAGGPSVFLFPPKPKDTLYITREPEVTCVVVDVSHEDPEVKF | Clone CH3C.35.23.2.1 |
| | NWYVDGVEVHNAKTKPREEQYNSTYRVVSVLTVLHQDWLNGKEY | with hole, LALAPG, and |
| | KCKVSNKALGAPIEKTISKAKGQPREPQVYTLPPSRDELTKNQVSLS | YTE mutations |
| | CAVKGFYPSDIAVEWESYGTEWANYKTTPPVLDSDGSFFLVSKLTV | |
| | SKSEWQQGFVFSCSVMHEALHNHYTQKSLSLSPGK | |
| 232 | PCPAPELLGGPSVFLFPPKPKDTLMISRTPEVTCVVVDVSHEDPEVKF | Clone CH3C.35.23.1.1 |
| | NWYVDGVEVHNAKTKPREEQYNSTYRVVSVLTVLHQDWLNGKEY | with knob mutation |
| | KCKVSNKALPAPIEKTISKAKGQPREPQVYTLPPSRDELTKNQVSLW | |
| | CLVKGFYPSDIAVEWESFGTEWSNYKTTPPVLDSDGSFFLYSKLTVS | |
| | KEEWQQGFVFSCSVMHEALHNHYTQKSLSLSPGK | |
| 233 | PCPAPEAAGGPSVFLFPPKPKDTLMISRTPEVTCVVVDVSHEDPEVK | Clone CH3C.35.23.1.1 |
| | FNWYVDGVEVHNAKTKPREEQYNSTYRVVSVLTVLHQDWLNGKE | with knob and LALA |
| | YKCKVSNKALPAPIEKTISKAKGQPREPQVYTLPPSRDELTKNQVSL | mutations |
| | WCLVKGFYPSDIAVEWESFGTEWSNYKTTPPVLDSDGSFFLYSKLT | |
| | VSKEEWQQGFVFSCSVMHEALHNHYTQKSLSLSPGK | |
| 234 | PCPAPEAAGGPSVFLFPPKPKDTLMISRTPEVTCVVVDVSHEDPEVK | Clone CH3C.35.23.1.1 |
| | FNWYVDGVEVHNAKTKPREEQYNSTYRVVSVLTVLHQDWLNGKE | with knob and LALAPG |
| | YKCKVSNKALGAPIEKTISKAKGQPREPQVYTLPPSRDELTKNQVSL | mutations |
| | WCLVKGFYPSDIAVEWESFGTEWSNYKTTPPVLDSDGSFFLYSKLT | |
| | VSKEEWQQGFVFSCSVMHEALHNHYTQKSLSLSPGK | |
| 235 | PCPAPELLGGPSVFLFPPKPKDTLYITREPEVTCVVVDVSHEDPEVKF | Clone CH3C.35.23.1.1 |
| | NWYVDGVEVHNAKTKPREEQYNSTYRVVSVLTVLHQDWLNGKEY | with knob and YTE |
| | KCKVSNKALPAPIEKTISKAKGQPREPQVYTLPPSRDELTKNQVSLW | mutations |
| | CLVKGFYPSDIAVEWESFGTEWSNYKTTPPVLDSDGSFFLYSKLTVS | |
| | KEEWQQGFVFSCSVMHEALHNHYTQKSLSLSPGK | |
| 236 | PCPAPEAAGGPSVFLFPPKPKDTLYITREPEVTCVVVDVSHEDPEVKF | Clone CH3C.35.23.1.1 |
| | NWYVDGVEVHNAKTKPREEQYNSTYRVVSVLTVLHQDWLNGKEY | with knob, LALA, and |
| | KCKVSNKALPAPIEKTISKAKGQPREPQVYTLPPSRDELTKNQVSLW | YTE mutations |
| | CLVKGFYPSDIAVEWESFGTEWSNYKTTPPVLDSDGSFFLYSKLTVS | |
| | KEEWQQGFVFSCSVMHEALHNHYTQKSLSLSPGK | |
| 237 | PCPAPEAAGGPSVFLFPPKPKDTLYITREPEVTCVVVDVSHEDPEVKF | Clone CH3C.35.23.1.1 |
| | NWYVDGVEVHNAKTKPREEQYNSTYRVVSVLTVLHQDWLNGKEY | with knob, LALAPG, and |
| | KCKVSNKALGAPIEKTISKAKGQPREPQVYTLPPSRDELTKNQVSLW | YTE mutations |
| | CLVKGFYPSDIAVEWESFGTEWSNYKTTPPVLDSDGSFFLYSKLTVS | |
| | KEEWQQGFVFSCSVMHEALHNHYTQKSLSLSPGK | |
| 238 | PCPAPELLGGPSVFLFPPKPKDTLMISRTPEVTCVVVDVSHEDPEVKF | Clone CH3C.35.23.1.1 |
| | NWYVDGVEVHNAKTKPREEQYNSTYRVVSVLTVLHQDWLNGKEY | with hole mutations |
| | KCKVSNKALPAPIEKTISKAKGQPREPQVYTLPPSRDELTKNQVSLS | |
| | CAVKGFYPSDIAVEWESFGTEWSNYKTTPPVLDSDGSFFLVSKLTVS | |
| | KEEWQQGFVFSCSVMHEALHNHYTQKSLSLSPGK | |
| 239 | PCPAPEAAGGPSVFLFPPKPKDTLMISRTPEVTCVVVDVSHEDPEVK | Clone CH3C.35.23.1.1 |
| | FNWYVDGVEVHNAKTKPREEQYNSTYRVVSVLTVLHQDWLNGKE | with hole and LALA |
| | YKCKVSNKALPAPIEKTISKAKGQPREPQVYTLPPSRDELTKNQVSL | mutations |
| | SCAVKGFYPSDIAVEWESFGTEWSNYKTTPPVLDSDGSFFLVSKLTV | |
| | SKEEWQQGFVFSCSVMHEALHNHYTQKSLSLSPGK | |
| 240 | PCPAPEAAGGPSVFLFPPKPKDTLMISRTPEVTCVVVDVSHEDPEVK | Clone CH3C.35.23.1.1 |
| | FNWYVDGVEVHNAKTKPREEQYNSTYRVVSVLTVLHQDWLNGKE | with hole and LALAPG |
| | YKCKVSNKALGAPIEKTISKAKGQPREPQVYTLPPSRDELTKNQVSL | mutations |
| | SCAVKGFYPSDIAVEWESFGTEWSNYKTTPPVLDSDGSFFLVSKLTV | |
| | SKEEWQQGFVFSCSVMHEALHNHYTQKSLSLSPGK | |
| 241 | PCPAPELLGGPSVFLFPPKPKDTLYITREPEVTCVVVDVSHEDPEVKF | Clone CH3C.35.23.1.1 |
| | NWYVDGVEVHNAKTKPREEQYNSTYRVVSVLTVLHQDWLNGKEY | with hole and YTE |
| | KCKVSNKALPAPIEKTISKAKGQPREPQVYTLPPSRDELTKNQVSLS | mutations |
| | CAVKGFYPSDIAVEWESFGTEWSNYKTTPPVLDSDGSFFLVSKLTVS | |
| | KEEWQQGFVFSCSVMHEALHNHYTQKSLSLSPGK | |
| 242 | PCPAPEAAGGPSVFLFPPKPKDTLYITREPEVTCVVVDVSHEDPEVKF | Clone CH3C.35.23.1.1 |
| | NWYVDGVEVHNAKTKPREEQYNSTYRVVSVLTVLHQDWLNGKEY | with hole, LALA, and |
| | KCKVSNKALPAPIEKTISKAKGQPREPQVYTLPPSRDELTKNQVSLS | YTE mutations |
| | CAVKGFYPSDIAVEWESFGTEWSNYKTTPPVLDSDGSFFLVSKLTVS | |
| | KEEWQQGFVFSCSVMHEALHNHYTQKSLSLSPGK | |
| 243 | PCPAPEAAGGPSVFLFPPKPKDTLYITREPEVTCVVVDVSHEDPEVKF | Clone CH3C.35.23.1.1 |
| | NWYVDGVEVHNAKTKPREEQYNSTYRVVSVLTVLHQDWLNGKEY | with hole, LALAPG, and |
| | KCKVSNKALGAPIEKTISKAKGQPREPQVYTLPPSRDELTKNQVSLS | YTE mutations |
| | CAVKGFYPSDIAVEWESFGTEWSNYKTTPPVLDSDGSFFLVSKLTVS | |
| | KEEWQQGFVFSCSVMHEALHNHYTQKSLSLSPGK | |
| 244 | PCPAPELLGGPSVFLFPPKPKDTLMISRTPEVTCVVVDVSHEDPEVKF | Clone CH3C.35.20.1 |
| | NWYVDGVEVHNAKTKPREEQYNSTYRVVSVLTVLHQDWLNGKEY | M201L and N207S |
| | KCKVSNKALPAPIEKTISKAKGQPREPQVYTLPPSRDELTKNQVSLT | mutations |
| | CLVKGFYPSDIAVEWESFGTEWSSYKTTPPVLDSDGSFFLYSKLTVT | |
| | KEEWQQGFVFSCSVLHEALHSHYTQKSLSLSPGK | |
| 245 | PCPAPELLGGPSVFLFPPKPKDTLMISRTPEVTCVVVDVSHEDPEVKF | Clone CH3C.35.20.1 with |
| | NWYVDGVEVHNAKTKPREEQYNSTYRVVSVLTVLHQDWLNGKEY | knob and M201L and |
| | KCKVSNKALPAPIEKTISKAKGQPREPQVYTLPPSRDELTKNQVSLW | N207S mutations |
| | CLVKGFYPSDIAVEWESFGTEWSSYKTTPPVLDSDGSFFLYSKLTVT | |
| | KEEWQQGFVFSCSVLHEALHSHYTQKSLSLSPGK | |
| 246 | PCPAPEAAGGPSVFLFPPKPKDTLMISRTPEVTCVVVDVSHEDPEVK | Clone CH3C.35.20.1 with |
| | FNWYVDGVEVHNAKTKPREEQYNSTYRVVSVLTVLHQDWLNGKE | knob, LALA, and M201L |
| | YKCKVSNKALPAPIEKTISKAKGQPREPQVYTLPPSRDELTKNQVSL | and N207S mutations |
| | WCLVKGFYPSDIAVEWESFGTEWSSYKTTPPVLDSDGSFFLYSKLTV | |
| | TKEEWQQGFVFSCSVLHEALHSHYTQKSLSLSPGK | |
| 247 | PCPAPEAAGGPSVFLFPPKPKDTLMISRTPEVTCVVVDVSHEDPEVK | Clone CH3C.35.20.1 with |
| | FNWYVDGVEVHNAKTKPREEQYNSTYRVVSVLTVLHQDWLNGKE | knob, LALAPG, and |
| | YKCKVSNKALGAPIEKTISKAKGQPREPQVYTLPPSRDELTKNQVSL | M201L and N207S |
| | WCLVKGFYPSDIAVEWESFGTEWSSYKTTPPVLDSDGSFFLYSKLTV | mutations |
| | TKEEWQQGFVFSCSVLHEALHSHYTQKSLSLSPGK | |
| 248 | PCPAPELLGGPSVFLFPPKPKDTLMISRTPEVTCVVVDVSHEDPEVKF | Clone CH3C.35.20.1 with |
| | NWYVDGVEVHNAKTKPREEQYNSTYRVVSVLTVLHQDWLNGKEY | hole and M201L and |
| | KCKVSNKALPAPIEKTISKAKGQPREPQVYTLPPSRDELTKNQVSLS | N207S mutations |
| | CAVKGFYPSDIAVEWESFGTEWSSYKTTPPVLDSDGSFFLVSKLTVT | |
| | KEEWQQGFVFSCSVLHEALHSHYTQKSLSLSPGK | |
| 249 | PCPAPEAAGGPSVFLFPPKPKDTLMISRTPEVTCVVVDVSHEDPEVK | Clone CH3C.35.20.1 with |
| | FNWYVDGVEVHNAKTKPREEQYNSTYRVVSVLTVLHQDWLNGKE | hole, LALA, and M201L |
| | YKCKVSNKALPAPIEKTISKAKGQPREPQVYTLPPSRDELTKNQVSL | and N207S mutations |
| | SCAVKGFYPSDIAVEWESFGTEWSSYKTTPPVLDSDGSFFLVSKLTV | |
| | TKEEWQQGFVFSCSVLHEALHSHYTQKSLSLSPGK | |
| 250 | PCPAPEAAGGPSVFLFPPKPKDTLMISRTPEVTCVVVDVSHEDPEVK | Clone CH3C.35.20.1 with |
| | FNWYVDGVEVHNAKTKPREEQYNSTYRVVSVLTVLHQDWLNGKE | hole, LALAPG, and |
| | YKCKVSNKALGAPIEKTISKAKGQPREPQVYTLPPSRDELTKNQVSL | M201L and N207S |
| | SCAVKGFYPSDIAVEWESFGTEWSSYKTTPPVLDSDGSFFLVSKLTV | mutations |
| | TKEEWQQGFVFSCSVLHEALHSHYTQKSLSLSPGK | |
| 251 | PCPAPELLGGPSVFLFPPKPKDTLMISRTPEVTCVVVDVSHEDPEVKF | Clone CH3C.35.23.2 with |
| | NWYVDGVEVHNAKTKPREEQYNSTYRVVSVLTVLHQDWLNGKEY | M201L and N207S |
| | KCKVSNKALPAPIEKTISKAKGQPREPQVYTLPPSRDELTKNQVSLT | mutations |
| | CLVKGFYPSDIAVEWESYGTEWANYKTTPPVLDSDGSFFLYSKLTV | |
| | TKEEWQQGFVFSCSVLHEALHSHYTQKSLSLSPGK | |
| 252 | PCPAPELLGGPSVFLFPPKPKDTLMISRTPEVTCVVVDVSHEDPEVKF | Clone CH3C.35.23.2 with |
| | NWYVDGVEVHNAKTKPREEQYNSTYRVVSVLTVLHQDWLNGKEY | knob and M201L and |
| | KCKVSNKALPAPIEKTISKAKGQPREPQVYTLPPSRDELTKNQVSLW | N207S mutations |
| | CLVKGFYPSDIAVEWESYGTEWANYKTTPPVLDSDGSFFLYSKLTV | |
| | TKEEWQQGFVFSCSVLHEALHSHYTQKSLSLSPGK | |
| 253 | PCPAPEAAGGPSVFLFPPKPKDTLMISRTPEVTCVVVDVSHEDPEVK | Clone CH3C.35.23.2 with |
| | FNWYVDGVEVHNAKTKPREEQYNSTYRVVSVLTVLHQDWLNGKE | knob, LALA, and M201L |
| | YKCKVSNKALPAPIEKTISKAKGQPREPQVYTLPPSRDELTKNQVSL | and N207S mutations |
| | WCLVKGFYPSDIAVEWESYGTEWANYKTTPPVLDSDGSFFLYSKLT | |
| | VTKEEWQQGFVFSCSVLHEALHSHYTQKSLSLSPGK | |
| 254 | PCPAPEAAGGPSVFLFPPKPKDTLMISRTPEVTCVVVDVSHEDPEVK | Clone CH3C.35.23.2 with |
| | FNWYVDGVEVHNAKTKPREEQYNSTYRVVSVLTVLHQDWLNGKE | knob, LALAPG, and |
| | YKCKVSNKALGAPIEKTISKAKGQPREPQVYTLPPSRDELTKNQVSL | M201L and N207S |
| | WCLVKGFYPSDIAVEWESYGTEWANYKTTPPVLDSDGSFFLYSKLT | mutations |
| | VTKEEWQQGFVFSCSVLHEALHSHYTQKSLSLSPGK | |
| 255 | PCPAPELLGGPSVFLFPPKPKDTLMISRTPEVTCVVVDVSHEDPEVKF | Clone CH3C.35.23.2 with |
| | NWYVDGVEVHNAKTKPREEQYNSTYRVVSVLTVLHQDWLNGKEY | hole and M201L and |
| | KCKVSNKALPAPIEKTISKAKGQPREPQVYTLPPSRDELTKNQVSLS | N207S mutations |
| | CAVKGFYPSDIAVEWESYGTEWANYKTTPPVLDSDGSFFLVSKLTV | |
| | TKEEWQQGFVFSCSVLHEALHSHYTQKSLSLSPGK | |
| 256 | PCPAPEAAGGPSVFLFPPKPKDTLMISRTPEVTCVVVDVSHEDPEVK | Clone CH3C.35.23.2 with |
| | FNWYVDGVEVHNAKTKPREEQYNSTYRVVSVLTVLHQDWLNGKE | hole, LALA, and M201L |
| | YKCKVSNKALPAPIEKTISKAKGQPREPQVYTLPPSRDELTKNQVSL | and N207S mutations |
| | SCAVKGFYPSDIAVEWESYGTEWANYKTTPPVLDSDGSFFLVSKLT | |
| | VTKEEWQQGFVFSCSVLHEALHSHYTQKSLSLSPGK | |
| 257 | PCPAPEAAGGPSVFLFPPKPKDTLMISRTPEVTCVVVDVSHEDPEVK | Clone CH3C.35.23.2 with |
| | FNWYVDGVEVHNAKTKPREEQYNSTYRVVSVLTVLHQDWLNGKE | hole, LALAPG, and |
| | YKCKVSNKALGAPIEKTISKAKGQPREPQVYTLPPSRDELTKNQVSL | M201L and N207S |
| | SCAVKGFYPSDIAVEWESYGTEWANYKTTPPVLDSDGSFFLVSKLT | mutations |
| | VTKEEWQQGFVFSCSVLHEALHSHYTQKSLSLSPGK | |
| 258 | PCPAPELLGGPSVFLFPPKPKDTLMISRTPEVTCVVVDVSHEDPEVKF | Clone CH3C.35.23.3 with |
| | NWYVDGVEVHNAKTKPREEQYNSTYRVVSVLTVLHQDWLNGKEY | M201L and N207S |
| | KCKVSNKALPAPIEKTISKAKGQPREPQVYTLPPSRDELTKNQVSLT | mutations |
| | CLVKGFYPSDIAVEWESYGTEWVNYKTTPPVLDSDGSFFLYSKLTV | |
| | TKEEWQQGFVFSCSVLHEALHSHYTQKSLSLSPGK | |
| 259 | PCPAPELLGGPSVFLFPPKPKDTLMISRTPEVTCVVVDVSHEDPEVKF | Clone CH3C.35.23.3 with |
| | NWYVDGVEVHNAKTKPREEQYNSTYRVVSVLTVLHQDWLNGKEY | knob and M201L and |
| | KCKVSNKALPAPIEKTISKAKGQPREPQVYTLPPSRDELTKNQVSLW | N207S mutations |
| | CLVKGFYPSDIAVEWESYGTEWVNYKTTPPVLDSDGSFFLYSKLTV | |
| | TKEEWQQGFVFSCSVLHEALHSHYTQKSLSLSPGK | |
| 260 | PCPAPEAAGGPSVFLFPPKPKDTLMISRTPEVTCVVVDVSHEDPEVK | Clone CH3C.35.23.3 with |
| | FNWYVDGVEVHNAKTKPREEQYNSTYRVVSVLTVLHQDWLNGKE | knob, LALA, and M201L |
| | YKCKVSNKALPAPIEKTISKAKGQPREPQVYTLPPSRDELTKNQVSL | and N207S mutations |
| | WCLVKGFYPSDIAVEWESYGTEWVNYKTTPPVLDSDGSFFLYSKLT | |
| | VTKEEWQQGFVFSCSVLHEALHSHYTQKSLSLSPGK | |
| 261 | PCPAPEAAGGPSVFLFPPKPKDTLMISRTPEVTCVVVDVSHEDPEVK | Clone CH3C.35.23.3 with |
| | FNWYVDGVEVHNAKTKPREEQYNSTYRVVSVLTVLHQDWLNGKE | knob, LALAPG, and |
| | YKCKVSNKALGAPIEKTISKAKGQPREPQVYTLPPSRDELTKNQVSL | M201L and N207S |
| | WCLVKGFYPSDIAVEWESYGTEWVNYKTTPPVLDSDGSFFLYSKLT | mutations |
| | VTKEEWQQGFVFSCSVLHEALHSHYTQKSLSLSPGK | |
| 262 | PCPAPELLGGPSVFLFPPKPKDTLMISRTPEVTCVVVDVSHEDPEVKF | Clone CH3C.35.23.3 with |
| | NWYVDGVEVHNAKTKPREEQYNSTYRVVSVLTVLHQDWLNGKEY | hole and M201L and |
| | KCKVSNKALPAPIEKTISKAKGQPREPQVYTLPPSRDELTKNQVSLS | N207S mutations |
| | CAVKGFYPSDIAVEWESYGTEWVNYKTTPPVLDSDGSFFLVSKLTV | |
| | TKEEWQQGFVFSCSVLHEALHSHYTQKSLSLSPGK | |
| 263 | PCPAPEAAGGPSVFLFPPKPKDTLMISRTPEVTCVVVDVSHEDPEVK | Clone CH3C.35.23.3 with |
| | FNWYVDGVEVHNAKTKPREEQYNSTYRVVSVLTVLHQDWLNGKE | hole, LALA, and M201L |
| | YKCKVSNKALPAPIEKTISKAKGQPREPQVYTLPPSRDELTKNQVSL | and N207S mutations |
| | SCAVKGFYPSDIAVEWESYGTEWVNYKTTPPVLDSDGSFFLVSKLT | |
| | VTKEEWQQGFVFSCSVLHEALHSHYTQKSLSLSPGK | |
| 264 | PCPAPEAAGGPSVFLFPPKPKDTLMISRTPEVTCVVVDVSHEDPEVK | Clone CH3C.35.23.3 with |
| | FNWYVDGVEVHNAKTKPREEQYNSTYRVVSVLTVLHQDWLNGKE | hole, LALAPG, and |
| | YKCKVSNKALGAPIEKTISKAKGQPREPQVYTLPPSRDELTKNQVSL | M201L and N207S |
| | SCAVKGFYPSDIAVEWESYGTEWVNYKTTPPVLDSDGSFFLVSKLT | mutations |
| | VTKEEWQQGFVFSCSVLHEALHSHYTQKSLSLSPGK | |
| 265 | PCPAPELLGGPSVFLFPPKPKDTLMISRTPEVTCVVVDVSHEDPEVKF | Clone CH3C.35.23.4 with |
| | NWYVDGVEVHNAKTKPREEQYNSTYRVVSVLTVLHQDWLNGKEY | M201L and N207S |
| | KCKVSNKALPAPIEKTISKAKGQPREPQVYTLPPSRDELTKNQVSLT | mutations |
| | CLVKGFYPSDIAVEWESYGTEWSNYKTTPPVLDSDGSFFLYSKLTVS | |
| | KEEWQQGFVFSCSVLHEALHSHYTQKSLSLSPGK | |
| 266 | PCPAPELLGGPSVFLFPPKPKDTLMISRTPEVTCVVVDVSHEDPEVKF | Clone CH3C.35.23.4 with |
| | NWYVDGVEVHNAKTKPREEQYNSTYRVVSVLTVLHQDWLNGKEY | knob and M201L and |
| | KCKVSNKALPAPIEKTISKAKGQPREPQVYTLPPSRDELTKNQVSLW | N207S mutations |
| | CLVKGFYPSDIAVEWESYGTEWSNYKTTPPVLDSDGSFFLYSKLTVS | |
| | KEEWQQGFVFSCSVLHEALHSHYTQKSLSLSPGK | |
| 267 | PCPAPEAAGGPSVFLFPPKPKDTLMISRTPEVTCVVVDVSHEDPEVK | Clone CH3C.35.23.4 with |
| | FNWYVDGVEVHNAKTKPREEQYNSTYRVVSVLTVLHQDWLNGKE | knob, LALA, and M201L |
| | YKCKVSNKALPAPIEKTISKAKGQPREPQVYTLPPSRDELTKNQVSL | and N207S mutations |
| | WCLVKGFYPSDIAVEWESYGTEWSNYKTTPPVLDSDGSFFLYSKLT | |
| | VSKEEWQQGFVFSCSVLHEALHSHYTQKSLSLSPGK | |
| 268 | PCPAPEAAGGPSVFLFPPKPKDTLMISRTPEVTCVVVDVSHEDPEVK | Clone CH3C.35.23.4 with |
| | FNWYVDGVEVHNAKTKPREEQYNSTYRVVSVLTVLHQDWLNGKE | knob, LALAPG, and |
| | YKCKVSNKALGAPIEKTISKAKGQPREPQVYTLPPSRDELTKNQVSL | M201L and N207S |
| | WCLVKGFYPSDIAVEWESYGTEWSNYKTTPPVLDSDGSFFLYSKLT | mutations |
| | VSKEEWQQGFVFSCSVLHEALHSHYTQKSLSLSPGK | |
| 269 | PCPAPELLGGPSVFLFPPKPKDTLMISRTPEVTCVVVDVSHEDPEVKF | Clone CH3C.35.23.4 with |
| | NWYVDGVEVHNAKTKPREEQYNSTYRVVSVLTVLHQDWLNGKEY | hole and M201L and |
| | KCKVSNKALPAPIEKTISKAKGQPREPQVYTLPPSRDELTKNQVSLS | N207S mutations |
| | CAVKGFYPSDIAVEWESYGTEWSNYKTTPPVLDSDGSFFLVSKLTVS | |
| | KEEWQQGFVFSCSVLHEALHSHYTQKSLSLSPGK | |
| 270 | PCPAPEAAGGPSVFLFPPKPKDTLMISRTPEVTCVVVDVSHEDPEVK | Clone CH3C.35.23.4 with |
| | FNWYVDGVEVHNAKTKPREEQYNSTYRVVSVLTVLHQDWLNGKE | hole, LALA, and M201L |
| | YKCKVSNKALPAPIEKTISKAKGQPREPQVYTLPPSRDELTKNQVSL | and N207S mutations |
| | SCAVKGFYPSDIAVEWESYGTEWSNYKTTPPVLDSDGSFFLVSKLTV | |
| | SKEEWQQGFVFSCSVLHEALHSHYTQKSLSLSPGK | |
| 271 | PCPAPEAAGGPSVFLFPPKPKDTLMISRTPEVTCVVVDVSHEDPEVK | Clone CH3C.35.23.4 with |
| | FNWYVDGVEVHNAKTKPREEQYNSTYRVVSVLTVLHQDWLNGKE | hole, LALAPG, and |
| | YKCKVSNKALGAPIEKTISKAKGQPREPQVYTLPPSRDELTKNQVSL | M201L and N207S |
| | SCAVKGFYPSDIAVEWESYGTEWSNYKTTPPVLDSDGSFFLVSKLTV | mutations |
| | SKEEWQQGFVFSCSVLHEALHSHYTQKSLSLSPGK | |
| 272 | PCPAPELLGGPSVFLFPPKPKDTLMISRTPEVTCVVVDVSHEDPEVKF | Clone CH3C.35.21.17.2 |
| | NWYVDGVEVHNAKTKPREEQYNSTYRVVSVLTVLHQDWLNGKEY | with M201L and N207S |
| | KCKVSNKALPAPIEKTISKAKGQPREPQVYTLPPSRDELTKNQVSLT | mutations |
| | CLVKGFYPSDIAVLWESYGTEWASYKTTPPVLDSDGSFFLYSKLTVT | |
| | KEEWQQGFVFSCSVLHEALHSHYTQKSLSLSPGK | |
| 273 | PCPAPELLGGPSVFLFPPKPKDTLMISRTPEVTCVVVDVSHEDPEVKF | Clone CH3C.35.21.17.2 |
| | NWYVDGVEVHNAKTKPREEQYNSTYRVVSVLTVLHQDWLNGKEY | with knob and M201L and |
| | KCKVSNKALPAPIEKTISKAKGQPREPQVYTLPPSRDELTKNQVSLW | N207S mutations |
| | CLVKGFYPSDIAVLWESYGTEWASYKTTPPVLDSDGSFFLYSKLTVT | |
| | KEEWQQGFVFSCSVLHEALHSHYTQKSLSLSPGK | |
| 274 | PCPAPEAAGGPSVFLFPPKPKDTLMISRTPEVTCVVVDVSHEDPEVK | Clone CH3C.35.21.17.2 |
| | FNWYVDGVEVHNAKTKPREEQYNSTYRVVSVLTVLHQDWLNGKE | with knob, LALA, and |
| | YKCKVSNKALPAPIEKTISKAKGQPREPQVYTLPPSRDELTKNQVSL | M201L and N207S |
| | WCLVKGFYPSDIAVLWESYGTEWASYKTTPPVLDSDGSFFLYSKLT | mutations |
| | VTKEEWQQGFVFSCSVLHEALHSHYTQKSLSLSPGK | |
| 275 | PCPAPEAAGGPSVFLFPPKPKDTLMISRTPEVTCVVVDVSHEDPEVK | Clone CH3C.35.21.17.2 |
| | FNWYVDGVEVHNAKTKPREEQYNSTYRVVSVLTVLHQDWLNGKE | with knob, LALAPG, and |
| | YKCKVSNKALGAPIEKTISKAKGQPREPQVYTLPPSRDELTKNQVSL | M201L and N207S |
| | WCLVKGFYPSDIAVLWESYGTEWASYKTTPPVLDSDGSFFLYSKLT | mutations |
| | VTKEEWQQGFVFSCSVLHEALHSHYTQKSLSLSPGK | |
| 276 | PCPAPELLGGPSVFLFPPKPKDTLMISRTPEVTCVVVDVSHEDPEVKF | Clone CH3C.35.21.17.2 |
| | NWYVDGVEVHNAKTKPREEQYNSTYRVVSVLTVLHQDWLNGKEY | with hole and M201L and |
| | KCKVSNKALPAPIEKTISKAKGQPREPQVYTLPPSRDELTKNQVSLS | N207S mutations |
| | CAVKGFYPSDIAVLWESYGTEWASYKTTPPVLDSDGSFFLVSKLTV | |
| | TKEEWQQGFVFSCSVLHEALHSHYTQKSLSLSPGK | |
| 277 | PCPAPEAAGGPSVFLFPPKPKDTLMISRTPEVTCVVVDVSHEDPEVK | Clone CH3C.35.21.17.2 |
| | FNWYVDGVEVHNAKTKPREEQYNSTYRVVSVLTVLHQDWLNGKE | with hole, LALA, and |
| | YKCKVSNKALPAPIEKTISKAKGQPREPQVYTLPPSRDELTKNQVSL | M201L and N207S |
| | SCAVKGFYPSDIAVLWESYGTEWASYKTTPPVLDSDGSFFLVSKLTV | mutations |
| | TKEEWQQGFVFSCSVLHEALHSHYTQKSLSLSPGK | |
| 278 | PCPAPEAAGGPSVFLFPPKPKDTLMISRTPEVTCVVVDVSHEDPEVK | Clone CH3C.35.21.17.2 |
| | FNWYVDGVEVHNAKTKPREEQYNSTYRVVSVLTVLHQDWLNGKE | with hold, LALAPG, and |
| | YKCKVSNKALGAPIEKTISKAKGQPREPQVYTLPPSRDELTKNQVSL | M201L and N207S |
| | SCAVKGFYPSDIAVLWESYGTEWASYKTTPPVLDSDGSFFLVSKLTV | mutations |
| | TKEEWQQGFVFSCSVLHEALHSHYTQKSLSLSPGK | |
| 279 | PCPAPELLGGPSVFLFPPKPKDTLMISRTPEVTCVVVDVSHEDPEVKF | Clone CH3C.35.23 with |
| | NWYVDGVEVHNAKTKPREEQYNSTYRVVSVLTVLHQDWLNGKEY | M201L and N207S |
| | KCKVSNKALPAPIEKTISKAKGQPREPQVYTLPPSRDELTKNQVSLT | mutations |
| | CLVKGFYPSDIAVEWESYGTEWSNYKTTPPVLDSDGSFFLYSKLTVT | |
| | KEEWQQGFVFSCSVLHEALHSHYTQKSLSLSPGK | |
| 280 | PCPAPELLGGPSVFLFPPKPKDTLMISRTPEVTCVVVDVSHEDPEVKF | Clone CH3C.35.23 with |
| | NWYVDGVEVHNAKTKPREEQYNSTYRVVSVLTVLHQDWLNGKEY | knob and M201L and |
| | KCKVSNKALPAPIEKTISKAKGQPREPQVYTLPPSRDELTKNQVSLW | N207S mutations |
| | CLVKGFYPSDIAVEWESYGTEWSNYKTTPPVLDSDGSFFLYSKLTVT | |
| | KEEWQQGFVFSCSVLHEALHSHYTQKSLSLSPGK | |
| 281 | PCPAPEAAGGPSVFLFPPKPKDTLMISRTPEVTCVVVDVSHEDPEVK | Clone CH3C.35.23 with |
| | FNWYVDGVEVHNAKTKPREEQYNSTYRVVSVLTVLHQDWLNGKE | knob, LALA, and M201L |
| | YKCKVSNKALPAPIEKTISKAKGQPREPQVYTLPPSRDELTKNQVSL | and N207S mutations |
| | WCLVKGFYPSDIAVEWESYGTEWSNYKTTPPVLDSDGSFFLYSKLT | |
| | VTKEEWQQGFVFSCSVLHEALHSHYTQKSLSLSPGK | |
| 282 | PCPAPEAAGGPSVFLFPPKPKDTLMISRTPEVTCVVVDVSHEDPEVK | Clone CH3C.35.23 with |
| | FNWYVDGVEVHNAKTKPREEQYNSTYRVVSVLTVLHQDWLNGKE | knob, LALAPG, and |
| | YKCKVSNKALGAPIEKTISKAKGQPREPQVYTLPPSRDELTKNQVSL | M201L and N207S |
| | WCLVKGFYPSDIAVEWESYGTEWSNYKTTPPVLDSDGSFFLYSKLT | mutations |
| | VTKEEWQQGFVFSCSVLHEALHSHYTQKSLSLSPGK | |
| 283 | PCPAPELLGGPSVFLFPPKPKDTLMISRTPEVTCVVVDVSHEDPEVKF | Clone CH3C.35.23 with |
| | NWYVDGVEVHNAKTKPREEQYNSTYRVVSVLTVLHQDWLNGKEY | hole and M201L and |
| | KCKVSNKALPAPIEKTISKAKGQPREPQVYTLPPSRDELTKNQVSLS | N207S mutations |
| | CAVKGFYPSDIAVEWESYGTEWSNYKTTPPVLDSDGSFFLVSKLTV | |
| | TKEEWQQGFVFSCSVLHEALHSHYTQKSLSLSPGK | |
| 284 | PCPAPEAAGGPSVFLFPPKPKDTLMISRTPEVTCVVVDVSHEDPEVK | Clone CH3C.35.23 with |
| | FNWYVDGVEVHNAKTKPREEQYNSTYRVVSVLTVLHQDWLNGKE | hole, LALA, and M201L |
| | YKCKVSNKALPAPIEKTISKAKGQPREPQVYTLPPSRDELTKNQVSL | and N207S mutations |
| | SCAVKGFYPSDIAVEWESYGTEWSNYKTTPPVLDSDGSFFLVSKLTV | |
| | TKEEWQQGFVFSCSVLHEALHSHYTQKSLSLSPGK | |
| 285 | PCPAPEAAGGPSVFLFPPKPKDTLMISRTPEVTCVVVDVSHEDPEVK | Clone CH3C.35.23 with |
| | FNWYVDGVEVHNAKTKPREEQYNSTYRVVSVLTVLHQDWLNGKE | hole, LALAPG, and |
| | YKCKVSNKALGAPIEKTISKAKGQPREPQVYTLPPSRDELTKNQVSL | M201L and N207S |
| | SCAVKGFYPSDIAVEWESYGTEWSNYKTTPPVLDSDGSFFLVSKLTV | mutations |
| | TKEEWQQGFVFSCSVLHEALHSHYTQKSLSLSPGK | |
| 286 | PCPAPELLGGPSVFLFPPKPKDTLMISRTPEVTCVVVDVSHEDPEVKF | Clone CH3C.35.21 with |
| | NWYVDGVEVHNAKTKPREEQYNSTYRVVSVLTVLHQDWLNGKEY | M201L and N207S |
| | KCKVSNKALPAPIEKTISKAKGQPREPQVYTLPPSRDELTKNQVSLT | mutations |
| | CLVKGFYPSDIAVWWESYGTEWSSYKTTPPVLDSDGSFFLYSKLTV | |
| | TKEEWQQGFVFSCSVLHEALHSHYTQKSLSLSPGK | |
| 287 | PCPAPELLGGPSVFLFPPKPKDTLMISRTPEVTCVVVDVSHEDPEVKF | Clone CH3C.35.21 with |
| | NWYVDGVEVHNAKTKPREEQYNSTYRVVSVLTVLHQDWLNGKEY | knob and M201L and |
| | KCKVSNKALPAPIEKTISKAKGQPREPQVYTLPPSRDELTKNQVSLW | N207S mutations |
| | CLVKGFYPSDIAVWWESYGTEWSSYKTTPPVLDSDGSFFLYSKLTV | |
| | TKEEWQQGFVFSCSVLHEALHSHYTQKSLSLSPGK | |
| 288 | PCPAPEAAGGPSVFLFPPKPKDTLMISRTPEVTCVVVDVSHEDPEVK | Clone CH3C.35.21 with |
| | FNWYVDGVEVHNAKTKPREEQYNSTYRVVSVLTVLHQDWLNGKE | knob, LALA, and M201L |
| | YKCKVSNKALPAPIEKTISKAKGQPREPQVYTLPPSRDELTKNQVSL | and N207S mutations |
| | WCLVKGFYPSDIAVWWESYGTEWSSYKTTPPVLDSDGSFFLYSKLT | |
| | VTKEEWQQGFVFSCSVLHEALHSHYTQKSLSLSPGK | |
| 289 | PCPAPEAAGGPSVFLFPPKPKDTLMISRTPEVTCVVVDVSHEDPEVK | Clone CH3C.35.21 with |
| | FNWYVDGVEVHNAKTKPREEQYNSTYRVVSVLTVLHQDWLNGKE | knob, LALAPG, and |
| | YKCKVSNKALGAPIEKTISKAKGQPREPQVYTLPPSRDELTKNQVSL | M201L and N207S |
| | WCLVKGFYPSDIAVWWESYGTEWSSYKTTPPVLDSDGSFFLYSKLT | mutations |
| | VTKEEWQQGFVFSCSVLHEALHSHYTQKSLSLSPGK | |
| 290 | PCPAPELLGGPSVFLFPPKPKDTLMISRTPEVTCVVVDVSHEDPEVKF | Clone CH3C.35.21 with |
| | NWYVDGVEVHNAKTKPREEQYNSTYRVVSVLTVLHQDWLNGKEY | hole and M201L and |
| | KCKVSNKALPAPIEKTISKAKGQPREPQVYTLPPSRDELTKNQVSLS | N207S mutations |
| | CAVKGFYPSDIAVWWESYGTEWSSYKTTPPVLDSDGSFFLVSKLTV | |
| | TKEEWQQGFVFSCSVLHEALHSHYTQKSLSLSPGK | |
| 291 | PCPAPEAAGGPSVFLFPPKPKDTLMISRTPEVTCVVVDVSHEDPEVK | Clone CH3C.35.21 with |
| | FNWYVDGVEVHNAKTKPREEQYNSTYRVVSVLTVLHQDWLNGKE | hole, LALA, and M201L |
| | YKCKVSNKALPAPIEKTISKAKGQPREPQVYTLPPSRDELTKNQVSL | and N207S mutations |
| | SCAVKGFYPSDIAVWWESYGTEWSSYKTTPPVLDSDGSFFLVSKLT | |
| | VTKEEWQQGFVFSCSVLHEALHSHYTQKSLSLSPGK | |
| 292 | PCPAPEAAGGPSVFLFPPKPKDTLMISRTPEVTCVVVDVSHEDPEVK | Clone CH3C.35.21 with |
| | FNWYVDGVEVHNAKTKPREEQYNSTYRVVSVLTVLHQDWLNGKE | hole, LALAPG, and |
| | YKCKVSNKALGAPIEKTISKAKGQPREPQVYTLPPSRDELTKNQVSL | M201L and N207S |
| | SCAVKGFYPSDIAVWWESYGTEWSSYKTTPPVLDSDGSFFLVSKLT | mutations |
| | VTKEEWQQGFVFSCSVLHEALHSHYTQKSLSLSPGK | |
| 293 | PCPAPELLGGPSVFLFPPKPKDTLMISRTPEVTCVVVDVSHEDPEVKF | Clone CH3C.35.20.1.1 |
| | NWYVDGVEVHNAKTKPREEQYNSTYRVVSVLTVLHQDWLNGKEY | with M201L and N207S |
| | KCKVSNKALPAPIEKTISKAKGQPREPQVYTLPPSRDELTKNQVSLT | mutations |
| | CLVKGFYPSDIAVEWESFGTEWSSYKTTPPVLDSDGSFFLYSKLTVS | |
| | KEEWQQGFVFSCSVLHEALHSHYTQKSLSLSPGK | |
| 294 | PCPAPELLGGPSVFLFPPKPKDTLMISRTPEVTCVVVDVSHEDPEVKF | Clone CH3C.35.20.1.1 |
| | NWYVDGVEVHNAKTKPREEQYNSTYRVVSVLTVLHQDWLNGKEY | with knob and M201L and |
| | KCKVSNKALPAPIEKTISKAKGQPREPQVYTLPPSRDELTKNQVSLW | N207S mutations |
| | CLVKGFYPSDIAVEWESFGTEWSSYKTTPPVLDSDGSFFLYSKLTVS | |
| | KEEWQQGFVFSCSVLHEALHSHYTQKSLSLSPGK | |
| 295 | PCPAPEAAGGPSVFLFPPKPKDTLMISRTPEVTCVVVDVSHEDPEVK | Clone CH3C.35.20.1.1 |
| | FNWYVDGVEVHNAKTKPREEQYNSTYRVVSVLTVLHQDWLNGKE | with knob, LALA, and |
| | YKCKVSNKALPAPIEKTISKAKGQPREPQVYTLPPSRDELTKNQVSL | M201L and N207s |
| | WCLVKGFYPSDIAVEWESFGTEWSSYKTTPPVLDSDGSFFLYSKLTV | mutations |
| | SKEEWQQGFVFSCSVLHEALHSHYTQKSLSLSPGK | |
| 296 | PCPAPEAAGGPSVFLFPPKPKDTLMISRTPEVTCVVVDVSHEDPEVK | Clone CH3C.35.20.1.1 |
| | FNWYVDGVEVHNAKTKPREEQYNSTYRVVSVLTVLHQDWLNGKE | with knob, LALAPG, and |
| | YKCKVSNKALGAPIEKTISKAKGQPREPQVYTLPPSRDELTKNQVSL | M201L and N207s |
| | WCLVKGFYPSDIAVEWESFGTEWSSYKTTPPVLDSDGSFFLYSKLTV | mutations |
| | SKEEWQQGFVFSCSVLHEALHSHYTQKSLSLSPGK | |
| 297 | PCPAPELLGGPSVFLFPPKPKDTLMISRTPEVTCVVVDVSHEDPEVKF | Clone CH3C.35.20.1.1 |
| | NWYVDGVEVHNAKTKPREEQYNSTYRVVSVLTVLHQDWLNGKEY | with hole and M201L and |
| | KCKVSNKALPAPIEKTISKAKGQPREPQVYTLPPSRDELTKNQVSLS | N207S mutations |
| | CAVKGFYPSDIAVEWESFGTEWSSYKTTPPVLDSDGSFFLVSKLTVS | |
| | KEEWQQGFVFSCSVLHEALHSHYTQKSLSLSPGK | |
| 298 | PCPAPEAAGGPSVFLFPPKPKDTLMISRTPEVTCVVVDVSHEDPEVK | Clone CH3C.35.20.1.1 |
| | FNWYVDGVEVHNAKTKPREEQYNSTYRVVSVLTVLHQDWLNGKE | with hole, LALA, and |
| | YKCKVSNKALPAPIEKTISKAKGQPREPQVYTLPPSRDELTKNQVSL | M201L and N207S |
| | SCAVKGFYPSDIAVEWESFGTEWSSYKTTPPVLDSDGSFFLVSKLTV | mutations |
| | SKEEWQQGFVFSCSVLHEALHSHYTQKSLSLSPGK | |
| 299 | PCPAPEAAGGPSVFLFPPKPKDTLMISRTPEVTCVVVDVSHEDPEVK | Clone CH3C.35.20.1.1 |
| | FNWYVDGVEVHNAKTKPREEQYNSTYRVVSVLTVLHQDWLNGKE | with hole, LALAPG, and |
| | YKCKVSNKALGAPIEKTISKAKGQPREPQVYTLPPSRDELTKNQVSL | M201L and N207S |
| | SCAVKGFYPSDIAVEWESFGTEWSSYKTTPPVLDSDGSFFLVSKLTV | mutations |
| | SKEEWQQGFVFSCSVLHEALHSHYTQKSLSLSPGK | |
| 300 | PCPAPELLGGPSVFLFPPKPKDTLMISRTPEVTCVVVDVSHEDPEVKF | Clone CH3C.35.23.2.1 |
| | NWYVDGVEVHNAKTKPREEQYNSTYRVVSVLTVLHQDWLNGKEY | with M201L and N207S |
| | KCKVSNKALPAPIEKTISKAKGQPREPQVYTLPPSRDELTKNQVSLT | mutations |
| | CLVKGFYPSDIAVEWESYGTEWANYKTTPPVLDSDGSFFLYSKLTV | |
| | SKSEWQQGFVFSCSVLHEALHSHYTQKSLSLSPGK | |
| 301 | PCPAPELLGGPSVFLFPPKPKDTLMISRTPEVTCVVVDVSHEDPEVKF | Clone CH3C.35.23.2.1 |
| | NWYVDGVEVHNAKTKPREEQYNSTYRVVSVLTVLHQDWLNGKEY | with knob and M201L and |
| | KCKVSNKALPAPIEKTISKAKGQPREPQVYTLPPSRDELTKNQVSLW | N207S mutations |
| | CLVKGFYPSDIAVEWESYGTEWANYKTTPPVLDSDGSFFLYSKLTV | |
| | SKSEWQQGFVFSCSVLHEALHSHYTQKSLSLSPGK | |
| 302 | PCPAPEAAGGPSVFLFPPKPKDTLMISRTPEVTCVVVDVSHEDPEVK | Clone CH3C.35.23.2.1 |
| | FNWYVDGVEVHNAKTKPREEQYNSTYRVVSVLTVLHQDWLNGKE | with knob, LALA, and |
| | YKCKVSNKALPAPIEKTISKAKGQPREPQVYTLPPSRDELTKNQVSL | M201L and N207S |
| | WCLVKGFYPSDIAVEWESYGTEWANYKTTPPVLDSDGSFFLYSKLT | mutations |
| | VSKSEWQQGFVFSCSVLHEALHSHYTQKSLSLSPGK | |
| 303 | PCPAPEAAGGPSVFLFPPKPKDTLMISRTPEVTCVVVDVSHEDPEVK | Clone CH3C.35.23.2.1 |
| | FNWYVDGVEVHNAKTKPREEQYNSTYRVVSVLTVLHQDWLNGKE | with knob, LALAPG, and |
| | YKCKVSNKALGAPIEKTISKAKGQPREPQVYTLPPSRDELTKNQVSL | M201L and N207S |
| | WCLVKGFYPSDIAVEWESYGTEWANYKTTPPVLDSDGSFFLYSKLT | mutations |
| | VSKSEWQQGFVFSCSVLHEALHSHYTQKSLSLSPGK | |
| 304 | PCPAPELLGGPSVFLFPPKPKDTLMISRTPEVTCVVVDVSHEDPEVKF | Clone CH3C.35.23.2.1 |
| | NWYVDGVEVHNAKTKPREEQYNSTYRVVSVLTVLHQDWLNGKEY | with hole and M201L and |
| | KCKVSNKALPAPIEKTISKAKGQPREPQVYTLPPSRDELTKNQVSLS | N207S mutations |
| | CAVKGFYPSDIAVEWESYGTEWANYKTTPPVLDSDGSFFLVSKLTV | |
| | SKSEWQQGFVFSCSVLHEALHSHYTQKSLSLSPGK | |
| 305 | PCPAPEAAGGPSVFLFPPKPKDTLMISRTPEVTCVVVDVSHEDPEVK | Clone CH3C.35.23.2.1 |
| | FNWYVDGVEVHNAKTKPREEQYNSTYRVVSVLTVLHQDWLNGKE | with hole, LALA, and |
| | YKCKVSNKALPAPIEKTISKAKGQPREPQVYTLPPSRDELTKNQVSL | M201L and N207S |
| | SCAVKGFYPSDIAVEWESYGTEWANYKTTPPVLDSDGSFFLVSKLT | mutations |
| | VSKSEWQQGFVFSCSVLHEALHSHYTQKSLSLSPGK | |
| 306 | PCPAPEAAGGPSVFLFPPKPKDTLMISRTPEVTCVVVDVSHEDPEVK | Clone CH3C.35.23.2.1 |
| | FNWYVDGVEVHNAKTKPREEQYNSTYRVVSVLTVLHQDWLNGKE | with hole, LALAPG, and |
| | YKCKVSNKALGAPIEKTISKAKGQPREPQVYTLPPSRDELTKNQVSL | M201L and N207S |
| | SCAVKGFYPSDIAVEWESYGTEWANYKTTPPVLDSDGSFFLVSKLT | mutations |
| | VSKSEWQQGFVFSCSVLHEALHSHYTQKSLSLSPGK | |
| 307 | PCPAPELLGGPSVFLFPPKPKDTLMISRTPEVTCVVVDVSHEDPEVKF | Clone CH3C.35.23.1.1 |
| | NWYVDGVEVHNAKTKPREEQYNSTYRVVSVLTVLHQDWLNGKEY | with M201L and N207S |
| | KCKVSNKALPAPIEKTISKAKGQPREPQVYTLPPSRDELTKNQVSLT | mutations |
| | CLVKGFYPSDIAVEWESFGTEWSNYKTTPPVLDSDGSFFLYSKLTVS | |
| | KEEWQQGFVFSCSVLHEALHSHYTQKSLSLSPGK | |
| 308 | PCPAPELLGGPSVFLFPPKPKDTLMISRTPEVTCVVVDVSHEDPEVKF | Clone CH3C.35.23.1.1 |
| | NWYVDGVEVHNAKTKPREEQYNSTYRVVSVLTVLHQDWLNGKEY | with knob and M201L and |
| | KCKVSNKALPAPIEKTISKAKGQPREPQVYTLPPSRDELTKNQVSLW | N207S mutations |
| | CLVKGFYPSDIAVEWESFGTEWSNYKTTPPVLDSDGSFFLYSKLTVS | |
| | KEEWQQGFVFSCSVLHEALHSHYTQKSLSLSPGK | |
| 309 | PCPAPEAAGGPSVFLFPPKPKDTLMISRTPEVTCVVVDVSHEDPEVK | Clone CH3C.35.23.1.1 |
| | FNWYVDGVEVHNAKTKPREEQYNSTYRVVSVLTVLHQDWLNGKE | with knob, LALA, and |
| | YKCKVSNKALPAPIEKTISKAKGQPREPQVYTLPPSRDELTKNQVSL | M201L and N207S |
| | WCLVKGFYPSDIAVEWESFGTEWSNYKTTPPVLDSDGSFFLYSKLT | mutations |
| | VSKEEWQQGFVFSCSVLHEALHSHYTQKSLSLSPGK | |
| 310 | PCPAPEAAGGPSVFLFPPKPKDTLMISRTPEVTCVVVDVSHEDPEVK | Clone CH3C.35.23.1.1 |
| | FNWYVDGVEVHNAKTKPREEQYNSTYRVVSVLTVLHQDWLNGKE | with knob, LALAPG, and |
| | YKCKVSNKALGAPIEKTISKAKGQPREPQVYTLPPSRDELTKNQVSL | M201L and N207S |
| | WCLVKGFYPSDIAVEWESFGTEWSNYKTTPPVLDSDGSFFLYSKLT | mutations |
| | VSKEEWQQGFVFSCSVLHEALHSHYTQKSLSLSPGK | |
| 311 | PCPAPELLGGPSVFLFPPKPKDTLMISRTPEVTCVVVDVSHEDPEVKF | Clone CH3C.35.23.1.1 |
| | NWYVDGVEVHNAKTKPREEQYNSTYRVVSVLTVLHQDWLNGKEY | with hole and M201L and |
| | KCKVSNKALPAPIEKTISKAKGQPREPQVYTLPPSRDELTKNQVSLS | N207S mutations |
| | CAVKGFYPSDIAVEWESFGTEWSNYKTTPPVLDSDGSFFLVSKLTVS | |
| | KEEWQQGFVFSCSVLHEALHSHYTQKSLSLSPGK | |
| 312 | PCPAPEAAGGPSVFLFPPKPKDTLMISRTPEVTCVVVDVSHEDPEVK | Clone CH3C.35.23.1.1 |
| | FNWYVDGVEVHNAKTKPREEQYNSTYRVVSVLTVLHQDWLNGKE | with hole, LALA, and |
| | YKCKVSNKALPAPIEKTISKAKGQPREPQVYTLPPSRDELTKNQVSL | M201L and N207S |
| | SCAVKGFYPSDIAVEWESFGTEWSNYKTTPPVLDSDGSFFLVSKLTV | mutations |
| | SKEEWQQGFVFSCSVLHEALHSHYTQKSLSLSPGK | |
| 313 | PCPAPEAAGGPSVFLFPPKPKDTLMISRTPEVTCVVVDVSHEDPEVK | Clone CH3C.35.23.1.1 |
| | FNWYVDGVEVHNAKTKPREEQYNSTYRVVSVLTVLHQDWLNGKE | with hole, LALAPG, and |
| | YKCKVSNKALGAPIEKTISKAKGQPREPQVYTLPPSRDELTKNQVSL | M201L and N207S |
| | SCAVKGFYPSDIAVEWESFGTEWSNYKTTPPVLDSDGSFFLVSKLTV | mutations |
| | SKEEWQQGFVFSCSVLHEALHSHYTQKSLSLSPGK | |
| 314 | X₁WESX₂GX₃X₄WX₅X₆ | CH3C.35_consensus |
| | X₁ is E, L, S, V, W, or Y; X₂ is an aromatic amino | sequence_1 |
| | acid (e.g., Y, F, or W), M, P, or V; X₃ is T, N, | |
| | or V; X₄ is E, I, P, or V; X₅ is an aliphatic amino | |
| | acid (e.g., A, I, or V), S, or T; and X₆ is S, N, | |
| | R, or T | |
| 315 | X₁KX₂X₃WQQGX₄VFX₅CX₆ | CH3C.35_consensus |
| | X₁ is T, H, or S; X₂ is E, S, D, G, T, P, Q, or R; | sequence_2 |
| | X₃ is E or R; X₄ is F, H, K, Y, or W; X₅ is S, T, or | |
| | W; and X₆ is S, C, P, M, or W | |
| 316 | GQPREPQVYTLPPSRDELTKNQVSLTCLVKGFYPSDIAVX₁WESX₂G | CH3C.35_consensus |
| | X₃X₄WX₅X₆YKTTPPVLDSDGSFFLYSKLTVX₇KX₈X₉WQQGX₁₀VFX11 | sequence_3 |
| | CX₁₂VMHEALHNHYTQKSLSLSPGK | |
| | X₁ is E, L, S, V, W, or Y; X₂ is an aromatic amino | |
| | acid (e.g., Y, F, or W), M, P, or V; X₃ is T, N, | |
| | or V; X₄ is E, I, P, or V; X₅ is an aliphatic amino | |
| | acid (e.g., A, I, or V), S, or T; X₆ is S, N, R, or | |
| | T; X₇ is T, H, or S; X₈ is E, S, D, G, T, P, Q, | |
| | or R; X₉ is E or R; X₁₀ is F, H, K, Y, or W; X₁₁ is | |
| | S, T, or W; and X₁₂ is S, C, P, M, or W | |
| 317 | X₁WESX₂GX₃X₄WX₅X₆ | CH3C.35_consensus |
| | X₁ is E, L, or W; X₂ is an aromatic amino acid | sequence_4 |
| | (e.g., Y or F); X₃ is T; X₄ is E; X₅ is an aliphatic | |
| | amino acid (e.g., A or V) or S; and X₆ is S or N | |
| 318 | X₁KX₂X₃WQQGX₄VFX₅CX₆ | CH3C.35_consensus |
| | X₁ is T or S; X₂ is E or S; X₃ is E; X₄ is F, H, Y, | sequence_5 |
| | or W; X₅ is S; and X₆ is S | |
| 319 | GQPREPQVYTLPPSRDELTKNQVSLTCLVKGFYPSDIAVX₁WESX₂G | CH3C.35_consensus |
| | X₃X₄WX₅X₆YKTTPPVLDSDGSFFLYSKLTVX₇KX₈X₉WQQGX₁₀VFX₁₁ | sequence_6 |
| | CX₁₂VMHEALHNHYTQKSLSLSPGK | |
| | X₁ is E, L, or W; X₂ is an aromatic amino acid | |
| | (e.g., Y or F); X₃ is T; X₄ is E; X₅ is an aliphatic | |
| | amino acid (e.g., A or V) or S; X₆ is S or N; X₇ is | |
| | T or S; X₈ is E or S; X₉ is E; X₁₀ is F, H, Y, or W; | |
| | X₁₁ is S; and X₁₂ is S | |
| 320 | X₁WESX₂GX₃X₄WX₅X₆ | CH3C.35_consensus |
| | X₁ is E, L, or W; X₂ is Y or F; X₃ is T; X4 is E; | sequence_70 |
| | X₅ is S, A or V; and X₆ is S or N | |
| 321 | X₁KX₂X₃WQQGX₄VFX₅CX₆ | CH3C.35_consensus |
| | X₁ is T or S; X₂ is E or S; X₃ is E; X₄ is F; X₅ is | sequence_8 |
| | S; and X₆ is S | |
| 322 | GQPREPQVYTLPPSRDELTKNQVSLTCLVKGFYPSDIAVX₁WESX₂G | CH3C.35_consensus |
| | X₃X₄WX₅X₆YKTTPPVLDSDGSFFLYSKLTVX₇KX₈X₉WQQGX₁₀VFX₁₁ | sequence_9 |
| | CX₁₂VMHEALHNHYTQKSLSLSPGK | |
| | X₁ is E, L, or W; X₂ is Y or F; X₃ is T; X₄ is E; X₅ | |
| | is S, A or V; X₆ is S or N; X₇ is T or S; X₈ is E | |
| | or S; X₉ is E; X₁₀ is F; X₁₁ is S; and X₁₂ is S | |
| 323 | GQPREPQVYTLPPSRDELTKNQVSLTCLVKGFYPSDIAVXWESYGTE | CH3C.35_consensus |
| | WSSYKTTPPVLDSDGSFFLYSKLTVTKEEWQQGFVFSCSVMHEALH | sequence_10 |
| | NHYTQKSLSLSPGK | |
| | X is E, L, S, V, W, or Y | |
| 324 | GQPREPQVYTLPPSRDELTKNQVSLTCLVKGFYPSDIAVWWESXGT | CH3C.35_consensus |
| | EWSSYKTTPPVLDSDGSFFLYSKLTVTKEEWQQGFVFSCSVMHEAL | sequence_11 |
| | HNHYTQKSLSLSPGK | |
| | X is Y, F, M, P, V, or W | |
| 325 | GQPREPQVYTLPPSRDELTKNQVSLTCLVKGFYPSDIAVWWESYGX | CH3C.35_consensus |
| | EWSSYKTTPPVLDSDGSFFLYSKLTVTKEEWQQGFVFSCSVMHEAL | sequence_12 |
| | HNHYTQKSLSLSPGK | |
| | X is T, N, or V | |
| 326 | GQPREPQVYTLPPSRDELTKNQVSLTCLVKGFYPSDIAVWWESYGT | CH3C.35_consensus |
| | XWSSYKTTPPVLDSDGSFFLYSKLTVTKEEWQQGFVFSCSVMHEAL | sequence_13 |
| | HNHYTQKSLSLSPGK | |
| | X is E, I, P, or V | |
| 327 | GQPREPQVYTLPPSRDELTKNQVSLTCLVKGFYPSDIAVWWESYGT | CH3C.35_consensus |
| | EWXSYKTTPPVLDSDGSFFLYSKLTVTKEEWQQGFVFSCSVMHEAL | sequence_14 |
| | HNHYTQKSLSLSPGK | |
| | X is S, A, I, T, or V | |
| 328 | GQPREPQVYTLPPSRDELTKNQVSLTCLVKGFYPSDIAVWWESYGT | CH3C.35_consensus |
| | EWSXYKTTPPVLDSDGSFFLYSKLTVTKEEWQQGFVFSCSVMHEAL | sequence_15 |
| | HNHYTQKSLSLSPGK | |
| | X is S, N, R, or T | |
| 329 | GQPREPQVYTLPPSRDELTKNQVSLTCLVKGFYPSDIAVWWESYGT | CH3C.35_consensus |
| | EWSSYKTTPPVLDSDGSFFLYSKLTVXKEEWQQGFVFSCSVMHEAL | sequence_16 |
| | HNHYTQKSLSLSPGK | |
| | X is T, H, or S | |
| 330 | GQPREPQVYTLPPSRDELTKNQVSLTCLVKGFYPSDIAVWWESYGT | CH3C.35_consensus |
| | EWSSYKTTPPVLDSDGSFFLYSKLTVTKXEWQQGFVFSCSVMHEAL | sequence_17 |
| | HNHYTQKSLSLSPGK | |
| | X is E, S, D, G, T, P, Q, or R | |
| 331 | GQPREPQVYTLPPSRDELTKNQVSLTCLVKGFYPSDIAVWWESYGT | CH3C.35_consensus |
| | EWSSYKTTPPVLDSDGSFFLYSKLTVTKEXWQQGFVFSCSVMHEAL | sequence_18 |
| | HNHYTQKSLSLSPGK | |
| | X is E or R | |
| 332 | GQPREPQVYTLPPSRDELTKNQVSLTCLVKGFYPSDIAVWWESYGT | CH3C.35_consensus |
| | EWSSYKTTPPVLDSDGSFFLYSKLTVTKEEWQQGXVFSCSVMHEAL | sequence_19 |
| | HNHYTQKSLSLSPGK | |
| | X is F, H, K, or Y | |
| 333 | GQPREPQVYTLPPSRDELTKNQVSLTCLVKGFYPSDIAVWWESYGT | CH3C.35_consensus |
| | EWSSYKTTPPVLDSDGSFFLYSKLTVTKEEWQQGFVFXCSVMHEAL | sequence_20 |
| | HNHYTQKSLSLSPGK | |
| | X is S, T, or W | |
| 334 | GQPREPQVYTLPPSRDELTKNQVSLTCLVKGFYPSDIAVWWESYGT | CH3C.35_consensus |
| | EWSSYKTTPPVLDSDGSFFLYSKLTVTKEEWQQGFVFSCXVMHEAL | sequence_21 |
| | HNHYTQKSLSLSPGK | |
| | X is S, C, P, M, or W | |
| 335 | X₁WESX₂GX₃X₄WX₅X₆X₇ | CH3C.18_consensus |
| | X₁ is E or W; X₂ is V, W, L, or Y; X₃ is L, P, F, T, | sequence_1 |
| | or H; X₄ is P, V, or E; X₅ is A, S, V, or G; X₆ is | |
| | L, H, Q, G, V, A N, D, T, or E; and X₇ is T, F, Q, | |
| | V, or Y | |
| 336 | X₁KSX₂WQQGX₃ | CH3C.18_consensus |
| | X₁ is L, S, E, A, or P; X₂ is E, D, T, or N; and | sequence_2 |
| | X₂ is W, Y, H, or F | |
| 337 | GQPREPQVYTLPPSRDELTKNQVSLTCLVKGFYPSDIAVX₁WESX₂G | CH3C.18_consensus |
| | X₃X₄WX₅X₆X₇KTTPPVLDSDGSFFLYSKLTVX₈KSX₉WQQGX₁₀VFSCS | sequence_3 |
| | VMHEALHNHYTQKSLSLSPGK | |
| | X₁ is E or W; X₂ is V, W, L, or Y; X₃ is L, P, F, T, | |
| | or H; X₄ is P, V, or E; X₅ is A, S, V, or G; X₆ is | |
| | L, H, Q, G, V, A N, D, T, or E; X₇ is T, F, Q, V, or | |
| | Y; X₈ is L, S, E, A, or P; X₉ is E, D, T, or N; and | |
| | X₁₀ is W, Y, H, or F | |
| 338 | X₁WESX₂GX₃X₄WX₅X₆X₇ | CH3C.18_consensus |
| | X₁ is E or W; X₂ is W, L, or Y; X₃ is T or H; X₄ is | sequence_4 |
| | V; X₅ is A, S, or V; X₆ is V, T, or N; and X₇ is Y | |
| | or Q | |
| 339 | X₁KSX₂WQQGX₃ | CH3C.18_consensus |
| | X₁ is P; X₂ is T or N; and X₃ is W, Y, H, or F | sequence_5 |
| 340 | GQPREPQVYTLPPSRDELTKNQVSLTCLVKGFYPSDIAVX₁WESX₂G | CH3C.18_consensus |
| | X₃X₄WX₅X₆X₇KTTPPVLDSDGSFFLYSKLTVX₈KSX₉WQQGX₁₀VFSCS | sequence_6 |
| | VMHEALHNHYTQKSLSLSPGK | |
| | X₁ is E or W; X₂ is W, L, or Y; X₃ is T or H; X₄ is | |
| | V; X₅ is A, S, or V; X₆ is V, T, or N; X₇ is Y or | |
| | Q; X₈ is P; X₉ is T or N; and X₁₀ is W, Y, H, or F | |
| 341 | TXWSX | Clone motif |
| 342 | NSVIIVDKNGRLVYLVENPGGYVAYSKAATVTGKLVHANFGTKKD | Consensus sequence |
| | FEDLDSPVNGSIVIVRAGKITFAEKVANAESLNAIGVLIYMDQTKFPI | between human and cyno |
| | VNAXLSFFGHAHLGTGDPYTPGFPSFNHTQFPPSRSSGLPNIPVQTIS | TfR |
| | RAAAEKLFGNMEGDCPSDWKTDSTCRMVTSENKNVKLTVS | |
| | X is D or E | |
| 343 | ASTKGPSVFPLAPSSKSTSGGTAALGCLVKDYFPEPVTVSWNSGALT | IGHG1_P01857 |
| | SGVHTFPAVLQSSGLYSLSSVVTVPSSSLGTQTYICNVNHKPSNTKV | |
| | DKKVEPKSCDKTHTCPPCPAPELLGGPSVFLFPPKPKDTLMISRTPEV | |
| | TCVVVDVSHEDPEVKFNWYVDGVEVHNAKTKPREEQYNSTYRVVS | |
| | VLTVLHQDWLNGKEYKCKVSNKALPAPIEKTISKAKGQPREPQVYT | |
| | LPPSRDELTKNQVSLTCLVKGFYPSDIAVEWESNGQPENNYKTTPPV | |
| | LDSDGSFFLYSKLTVDKSRWQQGNVFSCSVMHEALHNHYTQKSLSL | |
| | SPGK | |
| 344 | ASTKGPSVFPLAPCSRSTSESTAALGCLVKDYFPEPVTVSWNSGALT | IGHG2_P01859 |
| | SGVHTFPAVLQSSGLYSLSSVVTVPSSNFGTQTYTCNVDHKPSNTKV | |
| | DKTVERKCCVECPPCPAPPVAGPSVFLFPPKPKDTLMISRTPEVTCV | |
| | VVDVSHEDPEVQFNWYVDGVEVHNAKTKPREEQFNSTFRVVSVLT | |
| | VVHQDWLNGKEYKCKVSNKGLPAPIEKTISKTKGQPREPQVYTLPP | |
| | SREEMTKNQVSLTCLVKGFYPSDISVEWESNGQPENNYKTTPPMLD | |
| | SDGSFFLYSKLTVDKSRWQQGNVFSCSVMHEALHNHYTQKSLSLSP | |
| | GK | |
| 345 | ASTKGPSVFPLAPCSRSTSGGTAALGCLVKDYFPEPVTVSWNSGALT | IGHG3_P01860 |
| | SGVHTFPAVLQSSGLYSLSSVVTVPSSSLGTQTYTCNVNHKPSNTKV | |
| | DKRVELKTPLGDTTHTCPRCPEPKSCDTPPPCPRCPEPKSCDTPPPCP | |
| | RCPEPKSCDTPPPCPRCPAPELLGGPSVFLFPPKPKDTLMISRTPEVTC | |
| | VVVDVSHEDPEVQFKWYVDGVEVHNAKTKPREEQYNSTFRVVSVL | |
| | TVLHQDWLNGKEYKCKVSNKALPAPIEKTISKTKGQPREPQVYTLP | |
| | PSREEMTKNQVSLTCLVKGFYPSDIAVEWESSGQPENNYNTTPPML | |
| | DSDGSFFLYSKLTVDKSRWQQGNIFSCSVMHEALHNRFTQKSLSLSP | |
| | GK | |
| 346 | ASTKGPSVFPLAPCSRSTSESTAALGCLVKDYFPEPVTVSWNSGALT | IGHG4_P01861 |
| | SGVHTFPAVLQSSGLYSLSSVVTVPSSSLGTKTYTCNVDHKPSNTKV | |
| | DKRVESKYGPPCPSCPAPEFLGGPSVFLFPPKPKDTLMISRTPEVTCV | |
| | VVDVSQEDPEVQFNWYVDGVEVHNAKTKPREEQFNSTYRVVSVLT | |
| | VLHQDWLNGKEYKCKVSNKGLPSSIEKTISKAKGQPREPQVYTLPPS | |
| | QEEMTKNQVSLTCLVKGFYPSDIAVEWESNGQPENNYKTTPPVLDS | |
| | DGSFFLYSRLTVDKSRWQEGNVFSCSVMHEALHNHYTQKSLSLSLG | |
| | K | |
| 347 | APEAAGGPSVFLFPPKPKDTLMISRTPEVTCVVVDVSHEDPEVKFNW | Consensus sequence of |
| | YVDGVEVHNAKTKPREEQYNSTYRVVSVLTVLHQDWLNGKEYKC | clones CH3C.35.23.1.1, |
| | KVSNKALPAPIEKTISKAKGQPREPQVYTLPPSRDELTKNQVSLWCL | CH3C.35.23.3, |
| | VKGFYPSDIAVEWESX₁GTEWX₂NYKTTPPVLDSDGSFFLYSKLTVX₃ | CH3C.35.23.4, |
| | KEEWQQGFVFSCSVX₄HEALHX₅HYTQKSLSLSPGK, wherein X₁ is F | CH3C.35.23, and |
| | or Y; X₂ is S, A, or V; X₃ is S or T; X₄ is M or L; | CH3C.35.23.2 with knob, |
| | and X₅ is N or S | LALA, and optionally |
| | | M428L and N434S |
| | | mutations (EU numbering) |
| 348 | APEAAGGPSVFLFPPKPKDTLMISRTPEVTCVVVDVSHEDPEVKFNW | Consensus sequence of |
| | YVDGVEVHNAKTKPREEQYNSTYRVVSVLTVLHQDWLNGKEYKC | clones CH3C.35.23.1.1, |
| | KVSNKALPAPIEKTISKAKGQPREPQVYTLPPSRDELTKNQVSLSCA | CH3C.35.23.3, |
| | VKGFYPSDIAVEWESX₁GTEWX₂NYKTTPPVLDSDGSFFLVSKLTVX₃ | CH3C.35.23.4, |
| | KEEWQQGFVFSCSVX₄HEALHX₅HYTQKSLSLSPGK, wherein X₁ is F | CH3C.35.23, and |
| | or Y; X₂ is S, A, or V; X₃ is S or T; X₄ is M or L; | CH3C.35.23.2 with hole, |
| | and X₅ is N or S | LALA, and optionally |
| | | M428L and N434S |
| | | mutations (EU numbering) |
| 349 | APEAAGGPSVFLFPPKPKDTLMISRTPEVTCVVVDVSHEDPEVKFNW | Fc sequence with knob, |
| | YVDGVEVHNAKTKPREEQYNSTYRVVSVLTVLHQDWLNGKEYKC | LALA, and optionally |
| | KVSNKALPAPIEKTISKAKGQPREPQVYTLPPSRDELTKNQVSLWCL | M428L and N434S |
| | VKGFYPSDIAVEWESNGQPENNYKTTPPVLDSDGSFFLYSKLTVDKS | mutations (EU numbering) |
| | RWQQGNVFSCSVX₁HEALHX₂HYTQKSLSLSPGK, wherein X₁ is M | |
| | or L; and X₂ is N or S | |
| 350 | APEAAGGPSVFLFPPKPKDTLMISRTPEVTCVVVDVSHEDPEVKFNW | Fc sequence with hole, |
| | YVDGVEVHNAKTKPREEQYNSTYRVVSVLTVLHQDWLNGKEYKC | LALA, and optionally |
| | KVSNKALPAPIEKTISKAKGQPREPQVYTLPPSRDELTKNQVSLSCA | M428L and N434S |
| | VKGFYPSDIAVEWESNGQPENNYKTTPPVLDSDGSFFLVSKLTVDKS | mutations (EU numbering) |
| | RWQQGNVFSCSVX₁HEALHX₂HYTQKSLSLSPGK, wherein X₁ is M | |
| | or L; and X₂ is N or S | |
| 351 | APELLGGPSVFLFPPKPKDTLMISRTPEVTCVVVDVSHEDPEVKFNW | Fc sequence with knob |
| | YVDGVEVHNAKTKPREEQYNSTYRVVSVLTVLHQDWLNGKEYKC | mutation |
| | KVSNKALPAPIEKTISKAKGQPREPQVYTLPPSRDELTKNQVSLWCL | |
| | VKGFYPSDIAVEWESNGQPENNYKTTPPVLDSDGSFFLYSKLTVDKS | |
| | RWQQGNVFSCSVMHEALHNHYTQKSLSLSPGK | |
| 352 | APEAAGGPSVFLFPPKPKDTLMISRTPEVTCVVVDVSHEDPEVKFNW | Fc sequence with knob and |
| | YVDGVEVHNAKTKPREEQYNSTYRVVSVLTVLHQDWLNGKEYKC | LALA mutations |
| | KVSNKALPAPIEKTISKAKGQPREPQVYTLPPSRDELTKNQVSLWCL | |
| | VKGFYPSDIAVEWESNGQPENNYKTTPPVLDSDGSFFLYSKLTVDKS | |
| | RWQQGNVFSCSVMHEALHNHYTQKSLSLSPGK | |
| 353 | APEAAGGPSVFLFPPKPKDTLMISRTPEVTCVVVDVSHEDPEVKFNW | Fc sequence with knob, |
| | YVDGVEVHNAKTKPREEQYNSTYRVVSVLTVLHQDWLNGKEYKC | LALA, and M428L and |
| | KVSNKALPAPIEKTISKAKGQPREPQVYTLPPSRDELTKNQVSLWCL | N434S mutations (EU |
| | VKGFYPSDIAVEWESNGQPENNYKTTPPVLDSDGSFFLYSKLTVDKS | numbering) |
| | RWQQGNVFSCSVLHEALHSHYTQKSLSLSPGK | |
| 354 | APELLGGPSVFLFPPKPKDTLMISRTPEVTCVVVDVSHEDPEVKFNW | Fc sequence with hole |
| | YVDGVEVHNAKTKPREEQYNSTYRVVSVLTVLHQDWLNGKEYKC | mutations |
| | KVSNKALPAPIEKTISKAKGQPREPQVYTLPPSRDELTKNQVSLSCA | |
| | VKGFYPSDIAVEWESNGQPENNYKTTPPVLDSDGSFFLVSKLTVDKS | |
| | RWQQGNVFSCSVMHEALHNHYTQKSLSLSPGK | |
| 355 | APEAAGGPSVFLFPPKPKDTLMISRTPEVTCVVVDVSHEDPEVKFNW | Fc sequence with hole and |
| | YVDGVEVHNAKTKPREEQYNSTYRVVSVLTVLHQDWLNGKEYKC | LALA mutations |
| | KVSNKALPAPIEKTISKAKGQPREPQVYTLPPSRDELTKNQVSLSCA | |
| | VKGFYPSDIAVEWESNGQPENNYKTTPPVLDSDGSFFLVSKLTVDKS | |
| | RWQQGNVFSCSVMHEALHNHYTQKSLSLSPGK | |
| 356 | APEAAGGPSVFLFPPKPKDTLMISRTPEVTCVVVDVSHEDPEVKFNW | Fc sequence with hole, |
| | YVDGVEVHNAKTKPREEQYNSTYRVVSVLTVLHQDWLNGKEYKC | LALA, and M428L and |
| | KVSNKALPAPIEKTISKAKGQPREPQVYTLPPSRDELTKNQVSLSCA | N434S mutations (EU |
| | VKGFYPSDIAVEWESNGQPENNYKTTPPVLDSDGSFFLVSKLTVDKS | numbering) |
| | RWQQGNVFSCSVLHEALHSHYTQKSLSLSPGK | |

1. A polypeptide that specifically binds to a transferrin receptor, comprising a sequence having at least 85% sequence identity to the sequence of any one of SEQ ID NOS:83, 84, 191, 43, and 82, wherein the polypeptide comprises Glu at position 153, Tyr or Phe at position 157, Thr at position 159, Glu at position 160, Trp at position 161, Val, Ser, or Ala at position 162, Asn at position 163, Thr or Ser at position 186, Glu at position 188, Glu at position 189, and Phe at position 194, as numbered with reference to SEQ ID NO:1.

2. The polypeptide of claim 1, further comprising Trp at position 139, as numbered with reference to SEQ ID NO:1.

3. The polypeptide of claim 1, further comprising Ala at position 7, Ala at position 8, and Trp at position 139, as numbered with reference to SEQ ID NO:1.

4. The polypeptide of claim 1, further comprising Ala at position 7, Ala at position 8, Trp at position 139, Leu at position 201, and Ser at position 207, as numbered with reference to SEQ ID NO:1.

5. (canceled)

6. (canceled)

7. (canceled)

8. The polypeptide of claim 1, comprising a sequence having at least 85% sequence identity to the sequence of SEQ ID NO:83, wherein the polypeptide comprises Glu at position 153, Tyr at position 157, Thr at position 159, Glu at position 160, Trp at position 161, Val at position 162, Asn at position 163, Thr at position 186, Glu at position 188, Glu at position 189, and Phe at position 194, as numbered with reference to SEQ ID NO:1.

9. The polypeptide of claim 8, further comprising Trp at position 139, as numbered with reference to SEQ ID NO:1.

10. The polypeptide of claim 9, comprising the sequence of SEQ ID NO:133.

11. The polypeptide of claim 8, further comprising Ala at position 7, Ala at position 8, and Trp at position 139, as numbered with reference to SEQ ID NO:1.

12. The polypeptide of claim 11, comprising the sequence of SEQ ID NO:134.

13. The polypeptide of claim 8, further comprising Ala at position 7, Ala at position 8, Trp at position 139, Leu at position 201, and Ser at position 207, as numbered with reference to SEQ ID NO:1.

14. The polypeptide of claim 13, comprising the sequence of SEQ ID NO:260.

15. (canceled)

16. (canceled)

17. (canceled)

18. (canceled)

19. (canceled)

20. (canceled)

21. The polypeptide of claim 1, comprising a sequence having at least 85%, 90%, or 95% sequence identity to the sequence of SEQ ID NO:84, wherein the polypeptide comprises Glu at position 153, Tyr at position 157, Thr at position 159, Glu at position 160, Trp at position 161, Ser at position 162, Asn at position 163, Ser at position 186, Glu at position 188, Glu at position 189, and Phe at position 194, as numbered with reference to SEQ ID NO:1.

22. The polypeptide of claim 21, further comprising Trp at position 139, as numbered with reference to SEQ ID NO:1.

23. The polypeptide of claim 22, comprising the sequence of SEQ ID NO:145.

24. The polypeptide of claim 21, further comprising Ala at position 7, Ala at position 8, and Trp at position 139, as numbered with reference to SEQ ID NO:1.

25. The polypeptide of claim 24, comprising the sequence of SEQ ID NO:146.

26. The polypeptide of claim 21, further comprising Ala at position 7, Ala at position 8, Trp at position 139, Leu at position 201, and Ser at position 207, as numbered with reference to SEQ ID NO:1.

27. The polypeptide of claim 26, comprising the sequence of SEQ ID NO:267.

28-59. (canceled)

60. The polypeptide of claim 1, comprising a sequence having at least 85% sequence identity to the sequence of SEQ ID NO:82, wherein the polypeptide comprises Glu at position 153, Tyr at position 157, Thr at position 159, Glu at position 160, Trp at position 161, Ala at position 162, Asn at position 163, Thr at position 186, Glu at position 188, Glu at position 189, and Phe at position 194, as numbered with reference to SEQ ID NO:1.

61. The polypeptide of claim 60, further comprising Trp at position 139, as numbered with reference to SEQ ID NO:1.

62. The polypeptide of claim 61, comprising the sequence of SEQ ID NO:121.

63. The polypeptide of claim 60, further comprising Ala at position 7, Ala at position 8, and Trp at position 139, as numbered with reference to SEQ ID NO:1.

64. The polypeptide of claim 63, comprising the sequence of SEQ ID NO:122.

65. The polypeptide of claim 60, further comprising Ala at position 7, Ala at position 8, Trp at position 139, Leu at position 201, and Ser at position 207, as numbered with reference to SEQ ID NO:1.

66. The polypeptide of claim 65, comprising the sequence of SEQ ID NO:253.

67-72. (canceled)

73. The polypeptide of claim 1, wherein the polypeptide does not comprise the first three amino acids “PCP” at the amino-terminal end of the sequence.

74. (canceled)

75. (canceled)

76. The polypeptide of claim 1 further comprising an antibody heavy chain variable region.

77. A polypeptide comprising from N- to C- terminus:
an antibody heavy chain variable region, a CH1 domain, a hinge region, and the polypeptide of claim 1.

78. An Fc polypeptide dimer, or a dimeric fragment thereof, comprising:
(a) a first Fc polypeptide comprising the polypeptide of claim 1; and
(b) a second Fc polypeptide capable of dimerizing with the first Fc polypeptide of (a).

79. The Fc polypeptide dimer of claim 78, wherein the dimer is monovalent for TfR binding.

80. The Fc polypeptide dimer of claim 78, wherein the second Fc polypeptide comprises the sequence of any one of SEQ ID NOS: 354-356.

81. The Fc polypeptide dimer of claim 78, wherein:
(a) the first Fc polypeptide comprises the sequence of any one of SEQ ID NOS:133, 134, and 260; and the second Fc polypeptide comprises the sequence of any one of SEQ ID NOS:354-356; or
(b) the first Fc polypeptide comprises the sequence of any one of SEQ ID NOS:145, 146, and 267; and the second Fc polypeptide comprises the sequence of any one of SEQ ID NOS:354-356; or
(c) the first Fc polypeptide comprises the sequence of any one of SEQ ID NOS:121, 122, and 253; and the second Fc polypeptide comprises the sequence of any one of SEQ ID NOS:354-356.

82-90. (canceled)

91. The Fc polypeptide dimer of claim 78, wherein:
(a) the first Fc polypeptide comprises the sequence of SEQ ID NO:134 and the second Fc polypeptide comprises the sequence of SEQ ID NO:355; or
(b) the first Fc polypeptide comprises the sequence of SEQ ID NO:134 and the second Fc polypeptide comprises the sequence of SEQ ID NO:356; or
(c) the first Fc polypeptide comprises the sequence of SEQ ID NO:260 and the second Fc polypeptide comprises the sequence of SEQ ID NO:355; or
(d) the first Fc polypeptide comprises the sequence of SEQ ID NO:260 and the second Fc polypeptide comprises the sequence of SEQ ID NO:356.

92. The Fc polypeptide dimer of claim 78, wherein:
(a) the first Fc polypeptide comprises the sequence of SEQ ID NO:146 and the second Fc polypeptide comprises the sequence of SEQ ID NO:355; or
(b) the first Fc polypeptide comprises the sequence of SEQ ID NO:146 and the second Fc polypeptide comprises the sequence of SEQ ID NO:356; or
(c) the first Fc polypeptide comprises the sequence of SEQ ID NO:267 and the second Fc polypeptide comprises the sequence of SEQ ID NO:355; or
(d) the first Fc polypeptide comprises the sequence of SEQ ID NO:267 and the second Fc polypeptide comprises the sequence of SEQ ID NO:356.

93. (canceled)

94. (canceled)

95. The Fc polypeptide dimer of claim 78, wherein:
(a) the first Fc polypeptide comprises the sequence of SEQ ID NO:122 and the second Fc polypeptide comprises the sequence of SEQ ID NO:355; or
(b) the first Fc polypeptide comprises the sequence of SEQ ID NO:122 and the second Fc polypeptide comprises the sequence of SEQ ID NO:356; or
(c) the first Fc polypeptide comprises the sequence of SEQ ID NO:253 and the second Fc polypeptide comprises the sequence of SEQ ID NO:355; or
(d) the first Fc polypeptide comprises the sequence of SEQ ID NO:253 and the second Fc polypeptide comprises the sequence of SEQ ID NO:356.

96. The Fc polypeptide dimer of claim 78, wherein the first Fc polypeptide comprises the sequence of SEQ ID NO:347 and the second Fc polypeptide comprises the sequence of SEQ ID NO:350.

97-101. (canceled)

102. An Fc polypeptide dimer-Fab fusion protein comprising:
(a) an antibody variable region that is capable of binding an antigen, or antigen-binding fragment thereof; and
(b) an Fc polypeptide dimer of claim 78.

103. The Fc polypeptide dimer-Fab fusion protein of claim 102, wherein the antibody variable region forms part of a Fab domain.

104. The Fc polypeptide dimer-Fab fusion protein of claim 102, wherein the antibody variable region comprises two antibody heavy chain variable regions and two antibody light chain variable regions, or respective fragments thereof.

105. A polynucleotide comprising a nucleic acid sequence encoding the polypeptide of claim 1.

106. A vector comprising the polynucleotide of claim 105.

107. A host cell comprising the polynucleotide of claim 105.

108. A method for producing a polypeptide that specifically binds to a transferrin receptor, comprising culturing a host cell under conditions in which the polypeptide encoded by the polynucleotide of claim 105 is expressed.

109. A pharmaceutical composition comprising: the polypeptide of claim 1; and a pharmaceutically acceptable carrier.

110. A method for transcytosis of a composition across an endothelium, the method comprising contacting the endothelium with a composition comprising the polypeptide of claim 1.

111. (canceled)

The application's sequence listing, which the Patent Office published only in electronic form, follows.

SEQUENCE LISTING (356 sequences)

SEQ ID NO: 1 - protein, 220 aa, Homo sapiens
PCPAPELLGGPSVFLFPPKPKDTLMISRTPEVTCVVVDVSHEDPEVKFNWYVDGVEVHNAKTKPREEQYNSTYRVVSVLTVLHQDWLNGKEYKCKVSNKALPAPIEKTISKAKGQPREPQVYTLPPSRDELTKNQVSLTCLVKGFYPSDIAVEWESNGQPENNYKTTPPVLDSDGSFFLYSKLTVDKSRWQQGNVFSCSVMHEALHNHYTQKSLSLSPGK

SEQ ID NO: 2 - protein, 113 aa, Artificial Sequence
  Synthetic construct
PCPAPELLGGPSVFLFPPKPKDTLMISRTPEVTCVVVDVSHEDPEVKFNWYVDGVEVHNAKTKPREEQYNSTYRVVSVLTVLHQDWLNGKEYKCKVSNKALPAPIEKTISKAK

SEQ ID NO: 3 - protein, 107 aa, Artificial Sequence
  Synthetic construct
GQPREPQVYTLPPSRDELTKNQVSLTCLVKGFYPSDIAVEWESNGQPENNYKTTPPVLDSDGSFFLYSKLTVDKSRWQQGNVFSCSVMHEALHNHYTQKSLSLSPGK

SEQ ID NO: 4 - protein, 220 aa, Artificial Sequence
  Synthetic construct
PCPAPELLGGPSVFLFPPKPKDTLMISRTPEVTCVVVDVSHEDPEVKFNWYVDGVEVHNAKTKPREEQYNSTYRVVSVLTVLHQDWLNGKEYKCKVSNKALPAPIEKTISKAKGQPREPQVYTLPPSRDELTKNQVSLTCLVKGFYPSDIAVEWESLGLVWVGYKTTPPVLDSDGSFFLYSKLTVAKSTWQQGWVFSCSVMHEALHNHYTQKSLSLSPGK

SEQ ID NO: 5 - protein, 220 aa, Artificial Sequence
  Synthetic construct
PCPAPELLGGPSVFLFPPKPKDTLMISRTPEVTCVVVDVSHEDPEVKFNWYVDGVEVHNAKTKPREEQYNSTYRVVSVLTVLHQDWLNGKEYKCKVSNKALPAPIEKTISKAKGQPREPQVYTLPPSRDELTKNQVSLTCLVKGFYPSDIAVEWESYGTVWSHYKTTPPVLDSDGSFFLYSKLTVSKSEWQQGYVFSCSVMHEALHNHYTQKSLSLSPGK

SEQ ID NO: 6 - protein, 220 aa, Artificial Sequence
  Synthetic construct
PCPAPELLGGPSVFLFPPKPKDTLMISRTPEVTCVVVDVSHEDPEVKFNWYVDGVEVHNAKTKPREEQYNSTYRVVSVLTVLHQDWLNGKEYKCKVSNKALPAPIEKTISKAKGQPREPQVYTLPPSRDELTKNQVSLTCLVKGFYPSDIAVEWESYGTEWSQYKTTPPVLDSDGSFFLYSKLTVEKSDWQQGHVFSCSVMHEALHNHYTQKSLSLSPGK

SEQ ID NO: 7 - protein, 220 aa, Artificial Sequence
  Synthetic construct
PCPAPELLGGPSVFLFPPKPKDTLMISRTPEVTCVVVDVSHEDPEVKFNWYVDGVEVHNAKTKPREEQYNSTYRVVSVLTVLHQDWLNGKEYKCKVSNKALPAPIEKTISKAKGQPREPQVYTLPPSRDELTKNQVSLTCLVKGFYPSDIAVEWESVGTPWALYKTTPPVLDSDGSFFLYSKLTVLKSEWQQGWVFSCSVMHEALHNHYTQKSLSLSPGK

SEQ ID NO: 8 - protein, 220 aa, Artificial Sequence
  Synthetic construct
PCPAPELLGGPSVFLFPPKPKDTLMISRTPEVTCVVVDVSHEDPEVKFNWYVDGVEVHNAKTKPREEQYNSTYRVVSVLTVLHQDWLNGKEYKCKVSNKALPAPIEKTISKAKGQPREPQVYTLPPSRDELTKNQVSLTCLVKGFYPSDIAVEWESYGTVWSKYKTTPPVLDSDGSFFLYSKLTVSKSEWQQGFVFSCSVMHEALHNHYTQKSLSLSPGK

SEQ ID NO: 9 - protein, 220 aa, Artificial Sequence
  Synthetic construct
PCPAPELLGGPSVFLFPPKPKDTLMISRTPEVTCVVVDVSHEDPEVKFNWYVDGVEVHNAKTKPREEQYNSTYRVVSVLTVLHQDWLNGKEYKCKVSNKALPAPIEKTISKAKGQPREPQVYTLPPSRDELTKNQVSLTCLVKGFYPSDIAVEWESLGHVWAVYKTTPPVLDSDGSFFLYSKLTVPKSTWQQGWVFSCSVMHEALHNHYTQKSLSLSPGK

SEQ ID NO: 10 - protein, 220 aa, Artificial Sequence
  Synthetic construct
PCPAPELLGGPSVFLFPPKPKDTLMISRTPEVTCVVVDVSHEDPEVKFNWYVDGVEVHNAKTKPREEQYNSTYRVVSVLTVLHQDWLNGKEYKCKVSNKALPAPIEKTISKAKGQPREPQVYTLPPSRDELTKNQVSLTCLVKGFYPSDIAVEWESLGLVWVGYKTTPPVLDSDGSFFLYSKLTVPKSTWQQGWVFSCSVMHEALHNHYTQKSLSLSPGK

SEQ ID NO: 11 - protein, 220 aa, Artificial Sequence
  Synthetic construct
PCPAPELLGGPSVFLFPPKPKDTLMISRTPEVTCVVVDVSHEDPEVKFNWYVDGVEVHNAKTKPREEQYNSTYRVVSVLTVLHQDWLNGKEYKCKVSNKALPAPIEKTISKAKGQPREPQVYTLPPSRDELTKNQVSLTCLVKGFYPSDIAVEWESMGHVWVGYKTTPPVLDSDGSFFLYSKLTVDKSTWQQGWVFSCSVMHEALHNHYTQKSLSLSPGK

SEQ ID NO: 12 - protein, 220 aa, Artificial Sequence
  Synthetic construct
PCPAPELLGGPSVFLFPPKPKDTLMISRTPEVTCVVVDVSHEDPEVKFNWYVDGVEVHNAKTKPREEQYNSTYRVVSVLTVLHQDWLNGKEYKCKVSNKALPAPIEKTISKAKGQPREPQVYTLPPSRDELTKNQVSLTCLVKGFYPSDIAVEWESLGLVWVFSKTTPPVLDSDGSFFLYSKLTVPKSTWQQGWVFSCSVMHEALHNHYTQKSLSLSPGK

SEQ ID NO: 13 - protein, 220 aa, Artificial Sequence
  Synthetic construct
PCPAPELLGGPSVFLFPPKPKDTLMISRTPEVTCVVVDVSHEDPEVKFNWYVDGVEVHNAKTKPREEQYNSTYRVVSVLTVLHQDWLNGKEYKCKVSNKALPAPIEKTISKAKGQPREPQVYTLPPSRDELTKNQVSLTCLVKGFYPSDIAVEWESYGTEWSSYKTTPPVLDSDGSFFLYSKLTVTKSEWQQGFVFSCSVMHEALHNHYTQKSLSLSPGK

SEQ ID NO: 14 - protein, 220 aa, Artificial Sequence
  Synthetic construct
PCPAPELLGGPSVFLFPPKPKDTLMISRTPEVTCVVVDVSHEDPEVKFNWYVDGVEVHNAKTKPREEQYNSTYRVVSVLTVLHQDWLNGKEYKCKVSNKALPAPIEKTISKAKGQPREPQVYTLPPSRDELTKNQVSLTCLVKGFYPSDIAVEWESYGTEWSNYKTTPPVLDSDGSFFLYSKLTVSKSEWQQGFVFSCSVMHEALHNHYTQKSLSLSPGK

SEQ ID NO: 15 - protein, 220 aa, Artificial Sequence
  Synthetic construct
PCPAPELLGGPSVFLFPPKPKDTLMISRTPEVTCVVVDVSHEDPEVKFNWYVDGVEVHNAKTKPREEQYNSTYRVVSVLTVLHQDWLNGKEYKCKVSNKALPAPIEKTISKAKGQPREPQVYTLPPSRDELTKNQVSLTCLVKGFYPSDIAVEWESLGHVWVGYKTTPPVLDSDGSFFLYSKLTVSKSEWQQGWVFSCSVMHEALHNHYTQKSLSLSPGK

SEQ ID NO: 16 - protein, 220 aa, Artificial Sequence
  Synthetic construct
PCPAPELLGGPSVFLFPPKPKDTLMISRTPEVTCVVVDVSHEDPEVKFNWYVDGVEVHNAKTKPREEQYNSTYRVVSVLTVLHQDWLNGKEYKCKVSNKALPAPIEKTISKAKGQPREPQVYTLPPSRDELTKNQVSLTCLVKGFYPSDIAVEWESLGHVWVATKTTPPVLDSDGSFFLYSKLTVPKSTWQQGWVFSCSVMHEALHNHYTQKSLSLSPGK

SEQ ID NO: 17 - protein, 220 aa, Artificial Sequence
  Synthetic construct
PCPAPELLGGPSVFLFPPKPKDTLMISRTPEVTCVVVDVSHEDPEVKFNWYVDGVEVHNAKTKPREEQYNSTYRVVSVLTVLHQDWLNGKEYKCKVSNKALPAPIEKTISKAKGQPREPQVYTLPPSRDELTKNQVSLTCLVKGFYPSDIAVEWESLGPVWVHTKTTPPVLDSDGSFFLYSKLTVPKSTWQQGWVFSCSVMHEALHNHYTQKSLSLSPGK

SEQ ID NO: 18 - protein, 220 aa, Artificial Sequence
  Synthetic construct
PCPAPELLGGPSVFLFPPKPKDTLMISRTPEVTCVVVDVSHEDPEVKFNWYVDGVEVHNAKTKPREEQYNSTYRVVSVLTVLHQDWLNGKEYKCKVSNKALPAPIEKTISKAKGQPREPQVYTLPPSRDELTKNQVSLTCLVKGFYPSDIAVEWESLGHVWVDQKTTPPVLDSDGSFFLYSKLTVPKSTWQQGWVFSCSVMHEALHNHYTQKSLSLSPGK

SEQ ID NO: 19 - protein, 220 aa, Artificial Sequence
  Synthetic construct
PCPAPELLGGPSVFLFPPKPKDTLMISRTPEVTCVVVDVSHEDPEVKFNWYVDGVEVHNAKTKPREEQYNSTYRVVSVLTVLHQDWLNGKEYKCKVSNKALPAPIEKTISKAKGQPREPQVYTLPPSRDELTKNQVSLTCLVKGFYPSDIAVEWESLGHVWVNQKTTPPVLDSDGSFFLYSKLTVPKSTWQQGWVFSCSVMHEALHNHYTQKSLSLSPGK

SEQ ID NO: 20 - protein, 220 aa, Artificial Sequence
  Synthetic construct
PCPAPELLGGPSVFLFPPKPKDTLMISRTPEVTCVVVDVSHEDPEVKFNWYVDGVEVHNAKTKPREEQYNSTYRVVSVLTVLHQDWLNGKEYKCKVSNKALPAPIEKTISKAKGQPREPQVYTLPPSRDELTKNQVSLTCLVKGFYPSDIAVEWESLGHVWVNFKTTPPVLDSDGSFFLYSKLTVPKSTWQQGWVFSCSVMHEALHNHYTQKSLSLSPGK

SEQ ID NO: 21 - protein, 220 aa, Artificial Sequence
  Synthetic construct
PCPAPELLGGPSVFLFPPKPKDTLMISRTPEVTCVVVDVSHEDPEVKFNWYVDGVEVHNAKTKPREEQYNSTYRVVSVLTVLHQDWLNGKEYKCKVSNKALPAPIEKTISKAKGQPREPQVYTLPPSRDELTKNQVSLTCLVKGFYPSDIAVWWESLGHVWAVYKTTPPVLDSDGSFFLYSKLTVPKSTWQQGWVFSCSVMHEALHNHYTQKSLSLSPGK

SEQ ID NO: 22 - protein, 220 aa, Artificial Sequence
  Synthetic construct
PCPAPELLGGPSVFLFPPKPKDTLMISRTPEVTCVVVDVSHEDPEVKFNWYVDGVEVHNAKTKPREEQYNSTYRVVSVLTVLHQDWLNGKEYKCKVSNKALPAPIEKTISKAKGQPREPQVYTLPPSRDELTKNQVSLTCLVKGFYPSDIAVEWESLGHVWAVYQTTPPVLDSDGSFFLYSKLTVPKSTWQQGWVFSCSVMHEALHNHYTQKSLSLSPGK

SEQ ID NO: 23 - protein, 220 aa, Artificial Sequence
  Synthetic construct
PCPAPELLGGPSVFLFPPKPKDTLMISRTPEVTCVVVDVSHEDPEVKFNWYVDGVEVHNAKTKPREEQYNSTYRVVSVLTVLHQDWLNGKEYKCKVSNKALPAPIEKTISKAKGQPREPQVYTLPPSRDELTKNQVSLTCLVKGFYPSDIAVWWESLGHVWAVYQTTPPVLDSDGSFFLYSKLTVPKSTWQQGWVFSCSVMHEALHNHYTQKSLSLSPGK

SEQ ID NO: 24 - protein, 220 aa, Artificial Sequence
  Synthetic construct
PCPAPELLGGPSVFLFPPKPKDTLMISRTPEVTCVVVDVSHEDPEVKFNWYVDGVEVHNAKTKPREEQYNSTYRVVSVLTVLHQDWLNGKEYKCKVSNKALPAPIEKTISKAKGQPREPQVYTLPPSRDELTKNQVSLTCLVKGFYPSDIAVWWESYGTEWSSYKTTPPVLDSDGSFFLYSKLTVTKSEWQQGFVFSCSVMHEALHNHYTQKSLSLSPGK

SEQ ID NO: 25 - protein, 220 aa, Artificial Sequence
  Synthetic construct
PCPAPELLGGPSVFLFPPKPKDTLMISRTPEVTCVVVDVSHEDPEVKFNWYVDGVEVHNAKTKPREEQYNSTYRVVSVLTVLHQDWLNGKEYKCKVSNKALPAPIEKTISKAKGQPREPQVYTLPPSRDELTKNQVSLTCLVKGFYPSDIAVEWESYGTEWSSYKTTPPVLDSDGSFFLYSKLTVTKEEWQQGFVFSCSVMHEALHNHYTQKSLSLSPGK

SEQ ID NO: 26 - protein, 220 aa, Artificial Sequence
  Synthetic construct
PCPAPELLGGPSVFLFPPKPKDTLMISRTPEVTCVVVDVSHEDPEVKFNWYVDGVEVHNAKTKPREEQYNSTYRVVSVLTVLHQDWLNGKEYKCKVSNKALPAPIEKTISKAKGQPREPQVYTLPPSRDELTKNQVSLTCLVKGFYPSDIAVWWESYGTEWSSYKTTPPVLDSDGSFFLYSKLTVTKEEWQQGFVFSCSVMHEALHNHYTQKSLSLSPGK

SEQ ID NO: 27 - protein, 220 aa, Artificial Sequence
  Synthetic construct
PCPAPELLGGPSVFLFPPKPKDTLMISRTPEVTCVVVDVSHEDPEVKFNWYVDGVEVHNAKTKPREEQYNSTYRVVSVLTVLHQDWLNGKEYKCKVSNKALPAPIEKTISKAKGQPREPQVYTLPPSRDELTKNQVSLTCLVKGFYPSDIAVEWESYGTEWSNYKTTPPVLDSDGSFFLYSKLTVTKSEWQQGFVFSCSVMHEALHNHYTQKSLSLSPGK

SEQ ID NO: 28 - protein, 220 aa, Artificial Sequence
  Synthetic construct
PCPAPELLGGPSVFLFPPKPKDTLMISRTPEVTCVVVDVSHEDPEVKFNWYVDGVEVHNAKTKPREEQYNSTYRVVSVLTVLHQDWLNGKEYKCKVSNKALPAPIEKTISKAKGQPREPQVYTLPPSRDELTKNQVSLTCLVKGFYPSDIAVEWESYGTEWSSYQTTPPVLDSDGSFFLYSKLTVTKSEWQQGFVFSCSVMHEALHNHYTQKSLSLSPGK

SEQ ID NO: 29 - protein, 220 aa, Artificial Sequence
  Synthetic construct
PCPAPELLGGPSVFLFPPKPKDTLMISRTPEVTCVVVDVSHEDPEVKFNWYVDGVEVHNAKTKPREEQYNSTYRVVSVLTVLHQDWLNGKEYKCKVSNKALPAPIEKTISKAKGQPREPQVYTLPPSRDELTKNQVSLTCLVKGFYPSDIAVEWESYGTEWSNYQTTPPVLDSDGSFFLYSKLTVTKSEWQQGFVFSCSVMHEALHNHYTQKSLSLSPGK

SEQ ID NO: 30 - protein, 181 aa, Homo sapiens
NSVIIVDKNGRLVYLVENPGGYVAYSKAATVTGKLVHANFGTKKDFEDLYTPVNGSIVIVRAGKITFAEKVANAESLNAIGVLIYMDQTKFPIVNAELSFFGHAHLGTGDPYTPGFPSFNHTQFPPSRSSGLPNIPVQTISRAAAEKLFGNMEGDCPSDWKTDSTCRMVTSESKNVKLTVS

SEQ ID NO: 31 - protein, 181 aa, Macaca fascicularis
NSVIIVDKNGGLVYLVENPGGYVAYSKAATVTGKLVHANFGTKKDFEDLDSPVNGSIVIVRAGKITFAEKVANAESLNAIGVLIYMDQTKFPIVKADLSFFGHAHLGTGDPYTPGFPSFNHTQFPPSQSSGLPNIPVQTISRAAAEKLFGNMEGDCPSDWKTDSTCKMVTSENKSVKLTVS

SEQ ID NO: 32 - protein, 159 aa, Artificial Sequence
  Synthetic construct
SSGLPNIPVQTISRAAAEKLFGNMEGDCPSDWKTDSTCRMVTSESKNVKLTVSNDSAQNSVIIVDKNGRLVYLVENPGGYVAYSKAATVTGKLVHANFGTKKDFEDLYTPVNGSIVIVRAGKITFAEKVANAESLNAIGVLIYMDQTKFPIVNAELSGP

SEQ ID NO: 33 - protein, 159 aa, Artificial Sequence
  Synthetic construct
SSGLPNIPVQTISRAAAEKLFGNMEGDCPSDWKTDSTCKMVTSENKSVKLTVSNDSAQNSVIIVDKNGGLVYLVENPGGYVAYSKAATVTGKLVHANFGTKKDFEDLDSPVNGSIVIVRAGKITFAEKVANAESLNAIGVLIYMDQTKFPIVKADLSGP

SEQ ID NO: 34 - protein, 12 aa, Artificial Sequence
  Synthetic construct
  misc_feature (4)..(4): Xaa can be any naturally occurring amino acid
  misc_feature (6)..(10): Xaa can be any naturally occurring amino acid
WESXGXXXXXYK

SEQ ID NO: 35 - protein, 12 aa, Artificial Sequence
  Synthetic construct
  misc_feature (3)..(3): Xaa can be any naturally occurring amino acid
  misc_feature (6)..(6): Xaa can be any naturally occurring amino acid
  misc_feature (11)..(11): Xaa can be any naturally occurring amino acid
TVXKSXWQQGXV

SEQ ID NO: 36 - protein, 5 aa, Artificial Sequence
  Synthetic construct
YGTEW

SEQ ID NO: 37 - protein, 15 aa, Homo sapiens
EPKSCDKTHTCPPCP

SEQ ID NO: 38 - protein, 760 aa, Homo sapiens
MMDQARSAFSNLFGGEPLSYTRFSLARQVDGDNSHVEMKLAVDEEENADNNTKANVTKPKRCSGSICYGTIAVIVFFLIGFMIGYLGYCKGVEPKTECERLAGTESPVREEPGEDFPAARRLYWDDLKRKLSEKLDSTDFTGTIKLLNENSYVPREAGSQKDENLALYVENQFREFKLSKVWRDQHFVKIQVKDSAQNSVIIVDKNGRLVYLVENPGGYVAYSKAATVTGKLVHANFGTKKDFEDLYTPVNGSIVIVRAGKITFAEKVANAESLNAIGVLIYMDQTKFPIVNAELSFFGHAHLGTGDPYTPGFPSFNHTQFPPSRSSGLPNIPVQTISRAAAEKLFGNMEGDCPSDWKTDSTCRMVTSESKNVKLTVSNVLKEIKILNIFGVIKGFVEPDHYVVVGAQRDAWGPGAAKSGVGTALLLKLAQMFSDMVLKDGFQPSRSIIFASWSAGDFGSVGATEWLEGYLSSLHLKAFTYINLDKAVLGTSNFKVSASPLLYTLIEKTMQNVKHPVTGQFLYQDSNWASKVEKLTLDNAAFPFLAYSGIPAVSFCFCEDTDYPYLGTTMDTYKELIERIPELNKVARAAAEVAGQFVIKLTHDVELNLDYERYNSQLLSFVRDLNQYRADIKEMGLSLQWLYSARGDFFRATSRLTTDFGNAEKTDRFVMKKLNDRVMRVEYHFLSPYVSPKESPFRHVFWGSGSHTLPALLENLKLRKQNNGAFNETLFRNQLALATWTIQGAANALSGDVWDIDNEF

SEQ ID NO: 39 - protein, 220 aa, Artificial Sequence; identical to SEQ ID NO: 24
  Synthetic construct

SEQ ID NO: 40 - protein, 220 aa, Artificial Sequence; identical to SEQ ID NO: 25
  Synthetic construct

SEQ ID NO: 41 - protein, 220 aa, Artificial Sequence; identical to SEQ ID NO: 26
  Synthetic construct

SEQ ID NO: 42 - protein, 220 aa, Artificial Sequence
  Synthetic construct
PCPAPELLGGPSVFLFPPKPKDTLMISRTPEVTCVVVDVSHEDPEVKFNWYVDGVEVHNAKTKPREEQYNSTYRVVSVLTVLHQDWLNGKEYKCKVSNKALPAPIEKTISKAKGQPREPQVYTLPPSRDELTKNQVSLTCLVKGFYPSDIAVWWESYGTEWSNYKTTPPVLDSDGSFFLYSKLTVTKSEWQQGFVFSCSVMHEALHNHYTQKSLSLSPGK

SEQ ID NO: 43 - protein, 220 aa, Artificial Sequence
  Synthetic construct
PCPAPELLGGPSVFLFPPKPKDTLMISRTPEVTCVVVDVSHEDPEVKFNWYVDGVEVHNAKTKPREEQYNSTYRVVSVLTVLHQDWLNGKEYKCKVSNKALPAPIEKTISKAKGQPREPQVYTLPPSRDELTKNQVSLTCLVKGFYPSDIAVEWESYGTEWSNYKTTPPVLDSDGSFFLYSKLTVTKEEWQQGFVFSCSVMHEALHNHYTQKSLSLSPGK

SEQ ID NO: 44 - protein, 220 aa, Artificial Sequence
  Synthetic construct
PCPAPELLGGPSVFLFPPKPKDTLMISRTPEVTCVVVDVSHEDPEVKFNWYVDGVEVHNAKTKPREEQYNSTYRVVSVLTVLHQDWLNGKEYKCKVSNKALPAPIEKTISKAKGQPREPQVYTLPPSRDELTKNQVSLTCLVKGFYPSDIAVWWESYGTEWSNYKTTPPVLDSDGSFFLYSKLTVTKEEWQQGFVFSCSVMHEALHNHYTQKSLSLSPGK

SEQ ID NO: 45 - protein, 220 aa, Artificial Sequence; identical to SEQ ID NO: 21
  Synthetic construct

SEQ ID NO: 46 - protein, 220 aa, Artificial Sequence
  Synthetic construct
PCPAPELLGGPSVFLFPPKPKDTLMISRTPEVTCVVVDVSHEDPEVKFNWYVDGVEVHNAKTKPREEQYNSTYRVVSVLTVLHQDWLNGKEYKCKVSNKALPAPIEKTISKAKGQPREPQVYTLPPSRDELTKNQVSLTCLVKGFYPSDIAVLWESLGHVWAVYKTTPPVLDSDGSFFLYSKLTVPKSTWQQGWVFSCSVMHEALHNHYTQKSLSLSPGK

SEQ ID NO: 47 - protein, 220 aa, Artificial Sequence
  Synthetic construct
PCPAPELLGGPSVFLFPPKPKDTLMISRTPEVTCVVVDVSHEDPEVKFNWYVDGVEVHNAKTKPREEQYNSTYRVVSVLTVLHQDWLNGKEYKCKVSNKALPAPIEKTISKAKGQPREPQVYTLPPSRDELTKNQVSLTCLVKGFYPSDIAVYWESLGHVWAVYKTTPPVLDSDGSFFLYSKLTVPKSTWQQGWVFSCSVMHEALHNHYTQKSLSLSPGK

SEQ ID NO: 48 - protein, 220 aa, Artificial Sequence; identical to SEQ ID NO: 22
  Synthetic construct

SEQ ID NO: 49 - protein, 220 aa, Artificial Sequence
  Synthetic construct
PCPAPELLGGPSVFLFPPKPKDTLMISRTPEVTCVVVDVSHEDPEVKFNWYVDGVEVHNAKTKPREEQYNSTYRVVSVLTVLHQDWLNGKEYKCKVSNKALPAPIEKTISKAKGQPREPQVYTLPPSRDELTKNQVSLTCLVKGFYPSDIAVEWESLGHVWAVYFTTPPVLDSDGSFFLYSKLTVPKSTWQQGWVFSCSVMHEALHNHYTQKSLSLSPGK

SEQ ID NO: 50 - protein, 220 aa, Artificial Sequence
  Synthetic construct
PCPAPELLGGPSVFLFPPKPKDTLMISRTPEVTCVVVDVSHEDPEVKFNWYVDGVEVHNAKTKPREEQYNSTYRVVSVLTVLHQDWLNGKEYKCKVSNKALPAPIEKTISKAKGQPREPQVYTLPPSRDELTKNQVSLTCLVKGFYPSDIAVEWESLGHVWAVYHTTPPVLDSDGSFFLYSKLTVPKSTWQQGWVFSCSVMHEALHNHYTQKSLSLSPGK

SEQ ID NO: 51 - protein, 220 aa, Artificial Sequence
  Synthetic construct
PCPAPELLGGPSVFLFPPKPKDTLMISRTPEVTCVVVDVSHEDPEVKFNWYVDGVEVHNAKTKPREEQYNSTYRVVSVLTVLHQDWLNGKEYKCKVSNKALPAPIEKTISKAKGQPREPQVYTLPPSRDELTKNQVSLTCLVKGFYPSDIAVLWESYGTEWSSYKTTPPVLDSDGSFFLYSKLTVTKSEWQQGFVFSCSVMHEALHNHYTQKSLSLSPGK

SEQ ID NO: 52 - protein, 220 aa, Artificial Sequence
  Synthetic construct
PCPAPELLGGPSVFLFPPKPKDTLMISRTPEVTCVVVDVSHEDPEVKFNWYVDGVEVHNAKTKPREEQYNSTYRVVSVLTVLHQDWLNGKEYKCKVSNKALPAPIEKTISKAKGQPREPQVYTLPPSRDELTKNQVSLTCLVKGFYPSDIAVLWESYGTEWSSYRTTPPVLDSDGSFFLYSKLTVTKSEWQQGFVFSCSVMHEALHNHYTQKSLSLSPGK

SEQ ID NO: 53 - protein, 220 aa, Artificial Sequence
  Synthetic construct
PCPAPELLGGPSVFLFPPKPKDTLMISRTPEVTCVVVDVSHEDPEVKFNWYVDGVEVHNAKTKPREEQYNSTYRVVSVLTVLHQDWLNGKEYKCKVSNKALPAPIEKTISKAKGQPREPQVYTLPPSRDELTKNQVSLTCLVKGFYPSDIAVLWESYGTEWSSYRTTPPVLDSDGSFFLYSKLTVTREEWQQGFVFSCSVMHEALHNHYTQKSLSLSPGK

SEQ ID NO: 54 - protein, 220 aa, Artificial Sequence
  Synthetic construct
PCPAPELLGGPSVFLFPPKPKDTLMISRTPEVTCVVVDVSHEDPEVKFNWYVDGVEVHNAKTKPREEQYNSTYRVVSVLTVLHQDWLNGKEYKCKVSNKALPAPIEKTISKAKGQPREPQVYTLPPSRDELTKNQVSLTCLVKGFYPSDIAVLWESYGTEWSSYRTTPPVLDSDGSFFLYSKLTVTGEEWQQGFVFSCSVMHEALHNHYTQKSLSLSPGK

SEQ ID NO: 55 - protein, 220 aa, Artificial Sequence
  Synthetic construct
PCPAPELLGGPSVFLFPPKPKDTLMISRTPEVTCVVVDVSHEDPEVKFNWYVDGVEVHNAKTKPREEQYNSTYRVVSVLTVLHQDWLNGKEYKCKVSNKALPAPIEKTISKAKGQPREPQVYTLPPSRDELTKNQVSLTCLVKGFYPSDIAVLWESYGTEWSSYRTTPPVLDSDGSFFLYSKLTVTREEWQQGFVFSCWVMHEALHNHYTQKSLSLSPGK

SEQ ID NO: 56 - protein, 220 aa, Artificial Sequence
  Synthetic construct
PCPAPELLGGPSVFLFPPKPKDTLMISRTPEVTCVVVDVSHEDPEVKFNWYVDGVEVHNAKTKPREEQYNSTYRVVSVLTVLHQDWLNGKEYKCKVSNKALPAPIEKTISKAKGQPREPQVYTLPPSRDELTKNQVSLTCLVKGFYPSDIAVLWESYGTEWSSYRTTPPVLDSDGSFFLYSKLTVTKEEWQQGFVFSCWVMHEALHNHYTQKSLSLSPGK

SEQ ID NO: 57 - protein, 220 aa, Artificial Sequence
  Synthetic construct
PCPAPELLGGPSVFLFPPKPKDTLMISRTPEVTCVVVDVSHEDPEVKFNWYVDGVEVHNAKTKPREEQYNSTYRVVSVLTVLHQDWLNGKEYKCKVSNKALPAPIEKTISKAKGQPREPQVYTLPPSRDELTKNQVSLTCLVKGFYPSDIAVLWESYGTEWSSYRTTPPVLDSDGSFFLYSKLTVTREEWQQGFVFTCWVMHEALHNHYTQKSLSLSPGK

SEQ ID NO: 58 - protein, 220 aa, Artificial Sequence
  Synthetic construct
PCPAPELLGGPSVFLFPPKPKDTLMISRTPEVTCVVVDVSHEDPEVKFNWYVDGVEVHNAKTKPREEQYNSTYRVVSVLTVLHQDWLNGKEYKCKVSNKALPAPIEKTISKAKGQPREPQVYTLPPSRDELTKNQVSLTCLVKGFYPSDIAVLWESYGTEWSSYRTTPPVLDSDGSFFLYSKLTVTREEWQQGFVFTCGVMHEALHNHYTQKSLSLSPGK

SEQ ID NO: 59 - protein, 220 aa, Artificial Sequence
  Synthetic construct
PCPAPELLGGPSVFLFPPKPKDTLMISRTPEVTCVVVDVSHEDPEVKFNWYVDGVEVHNAKTKPREEQYNSTYRVVSVLTVLHQDWLNGKEYKCKVSNKALPAPIEKTISKAKGQPREPQVYTLPPSRDELTKNQVSLTCLVKGFYPSDIAVLWESYGTEWSSYRTTPPVLDSDGSFFLYSKLTVTREEWQQGFVFECWVMHEALHNHYTQKSLSLSPGK

SEQ ID NO: 60 - protein, 220 aa, Artificial Sequence
  Synthetic construct
PCPAPELLGGPSVFLFPPKPKDTLMISRTPEVTCVVVDVSHEDPEVKFNWYVDGVEVHNAKTKPREEQYNSTYRVVSVLTVLHQDWLNGKEYKCKVSNKALPAPIEKTISKAKGQPREPQVYTLPPSRDELTKNQVSLTCLVKGFYPSDIAVLWESYGTEWSSYRTTPPVLDSDGSFFLYSKLTVTREEWQQGFVFKCWVMHEALHNHYTQKSLSLSPGK

SEQ ID NO: 61 - protein, 220 aa, Artificial Sequence
  Synthetic construct
PCPAPELLGGPSVFLFPPKPKDTLMISRTPEVTCVVVDVSHEDPEVKFNWYVDGVEVHNAKTKPREEQYNSTYRVVSVLTVLHQDWLNGKEYKCKVSNKALPAPIEKTISKAKGQPREPQVYTLPPSRDELTKNQVSLTCLVKGFYPSDIAVLWESYGTEWSSYRTTPPVLDSDGSFFLYSKLTVTPEEWQQGFVFKCWVMHEALHNHYTQKSLSLSPGK

SEQ ID NO: 62 - protein, 220 aa, Artificial Sequence
  Synthetic construct
PCPAPELLGGPSVFLFPPKPKDTLMISRTPEVTCVVVDVSHEDPEVKFNWYVDGVEVHNAKTKPREEQYNSTYRVVSVLTVLHQDWLNGKEYKCKVSNKALPAPIEKTISKAKGQPREPQVYTLPPSRDELTKNQVSLTCLVKGFYPSDIAVWWESYGTEWSSYRTTPPVLDSDGSFFLYSKLTVTREEWQQGFVFSCSVMHEALHNHYTQKSLSLSPGK

SEQ ID NO: 63 - protein, 220 aa, Artificial Sequence
  Synthetic construct
PCPAPELLGGPSVFLFPPKPKDTLMISRTPEVTCVVVDVSHEDPEVKFNWYVDGVEVHNAKTKPREEQYNSTYRVVSVLTVLHQDWLNGKEYKCKVSNKALPAPIEKTISKAKGQPREPQVYTLPPSRDELTKNQVSLTCLVKGFYPSDIAVWWESYGTEWSSYRTTPPVLDSDGSFFLYSKLTVTGEEWQQGFVFSCSVMHEALHNHYTQKSLSLSPGK

SEQ ID NO: 64 - protein, 220 aa, Artificial Sequence
  Synthetic construct
PCPAPELLGGPSVFLFPPKPKDTLMISRTPEVTCVVVDVSHEDPEVKFNWYVDGVEVHNAKTKPREEQYNSTYRVVSVLTVLHQDWLNGKEYKCKVSNKALPAPIEKTISKAKGQPREPQVYTLPPSRDELTKNQVSLTCLVKGFYPSDIAVWWESYGTEWSSYRTTPPVLDSDGSFFLYSKLTVTREEWQQGFVFTCWVMHEALHNHYTQKSLSLSPGK

SEQ ID NO: 65 - protein, 220 aa, Artificial Sequence
  Synthetic construct
PCPAPELLGGPSVFLFPPKPKDTLMISRTPEVTCVVVDVSHEDPEVKFNWYVDGVEVHNAKTKPREEQYNSTYRVVSVLTVLHQDWLNGKEYKCKVSNKALPAPIEKTISKAKGQPREPQVYTLPPSRDELTKNQVSLTCLVKGFYPSDIAVWWESYGTEWSSYRTTPPVLDSDGSFFLYSKLTVTGEEWQQGFVFTCWVMHEALHNHYTQKSLSLSPGK

SEQ ID NO: 66 - protein, 220 aa, Artificial Sequence
  Synthetic construct
PCPAPELLGGPSVFLFPPKPKDTLMISRTPEVTCVVVDVSHEDPEVKFNWYVDGVEVHNAKTKPREEQYNSTYRVVSVLTVLHQDWLNGKEYKCKVSNKALPAPIEKTISKAKGQPREPQVYTLPPSRDELTKNQVSLTCLVKGFYPSDIAVWWESYGTEWSSYRTTPPVLDSDGSFFLYSKLTVTREEWQQGFVFTCGVMHEALHNHYTQKSLSLSPGK

SEQ ID NO: 67 - protein, 220 aa, Artificial Sequence
  Synthetic construct
PCPAPELLGGPSVFLFPPKPKDTLMISRTPEVTCVVVDVSHEDPEVKFNWYVDGVEVHNAKTKPREEQYNSTYRVVSVLTVLHQDWLNGKEYKCKVSNKALPAPIEKTISKAKGQPREPQVYTLPPSRDELTKNQVSLTCLVKGFYPSDIAVLWESYGTEWSSYKTTPPVLDSDGSFFLYSKLTVTKEEWQQGFVFSCSVMHEALHNHYTQKSLSLSPGK

SEQ ID NO: 68 - protein, 220 aa, Artificial Sequence
  Synthetic construct
PCPAPELLGGPSVFLFPPKPKDTLMISRTPEVTCVVVDVSHEDPEVKFNWYVDGVEVHNAKTKPREEQYNSTYRVVSVLTVLHQDWLNGKEYKCKVSNKALPAPIEKTISKAKGQPREPQVYTLPPSRDELTKNQVSLTCLVKGFYPSDIAVLWESYGTEWSSYRTTPPVLDSDGSFFLYSKLTVTKEEWQQGFVFSCSVMHEALHNHYTQKSLSLSPGK

SEQ ID NO: 69 - protein, 220 aa, Artificial Sequence
  Synthetic construct
PCPAPELLGGPSVFLFPPKPKDTLMISRTPEVTCVVVDVSHEDPEVKFNWYVDGVEVHNAKTKPREEQYNSTYRVVSVLTVLHQDWLNGKEYKCKVSNKALPAPIEKTISKAKGQPREPQVYTLPPSRDELTKNQVSLTCLVKGFYPSDIAVEWESFGTEWSSYKTTPPVLDSDGSFFLYSKLTVTKEEWQQGFVFSCSVMHEALHNHYTQKSLSLSPGK

SEQ ID NO: 70 - protein, 220 aa, Artificial Sequence
  Synthetic construct
PCPAPELLGGPSVFLFPPKPKDTLMISRTPEVTCVVVDVSHEDPEVKFNWYVDGVEVHNAKTKPREEQYNSTYRVVSVLTVLHQDWLNGKEYKCKVSNKALPAPIEKTISKAKGQPREPQVYTLPPSRDELTKNQVSLTCLVKGFYPSDIAVEWESYGTEWASYKTTPPVLDSDGSFFLYSKLTVTKEEWQQGFVFSCSVMHEALHNHYTQKSLSLSPGK

SEQ ID NO: 71 - protein, 220 aa, Artificial Sequence
  Synthetic construct
PCPAPELLGGPSVFLFPPKPKDTLMISRTPEVTCVVVDVSHEDPEVKFNWYVDGVEVHNAKTKPREEQYNSTYRVVSVLTVLHQDWLNGKEYKCKVSNKALPAPIEKTISKAKGQPREPQVYTLPPSRDELTKNQVSLTCLVKGFYPSDIAVEWESYGTEWVSYKTTPPVLDSDGSFFLYSKLTVTKEEWQQGFVFSCSVMHEALHNHYTQKSLSLSPGK

SEQ ID NO: 72 - protein, 220 aa, Artificial Sequence
  Synthetic construct
PCPAPELLGGPSVFLFPPKPKDTLMISRTPEVTCVVVDVSHEDPEVKFNWYVDGVEVHNAKTKPREEQYNSTYRVVSVLTVLHQDWLNGKEYKCKVSNKALPAPIEKTISKAKGQPREPQVYTLPPSRDELTKNQVSLTCLVKGFYPSDIAVEWESYGTEWSSYKTTPPVLDSDGSFFLYSKLTVSKEEWQQGFVFSCSVMHEALHNHYTQKSLSLSPGK

SEQ ID NO: 73 - protein, 220 aa, Artificial Sequence
  Synthetic construct
PCPAPELLGGPSVFLFPPKPKDTLMISRTPEVTCVVVDVSHEDPEVKFNWYVDGVEVHNAKTKPREEQYNSTYRVVSVLTVLHQDWLNGKEYKCKVSNKALPAPIEKTISKAKGQPREPQVYTLPPSRDELTKNQVSLTCLVKGFYPSDIAVEWESFGTEWASYKTTPPVLDSDGSFFLYSKLTVTKEEWQQGFVFSCSVMHEALHNHYTQKSLSLSPGK

SEQ ID NO: 74 - protein, 220 aa, Artificial Sequence
  Synthetic construct
PCPAPELLGGPSVFLFPPKPKDTLMISRTPEVTCVVVDVSHEDPEVKFNWYVDGVEVHNAKTKPREEQYNSTYRVVSVLTVLHQDWLNGKEYKCKVSNKALPAPIEKTISKAKGQPREPQVYTLPPSRDELTKNQVSLTCLVKGFYPSDIAVEWESFGTEWVSYKTTPPVLDSDGSFFLYSKLTVTKEEWQQGFVFSCSVMHEALHNHYTQKSLSLSPGK

SEQ ID NO: 75 - protein, 220 aa, Artificial Sequence
  Synthetic construct
PCPAPELLGGPSVFLFPPKPKDTLMISRTPEVTCVVVDVSHEDPEVKFNWYVDGVEVHNAKTKPREEQYNSTYRVVSVLTVLHQDWLNGKEYKCKVSNKALPAPIEKTISKAKGQPREPQVYTLPPSRDELTKNQVSLTCLVKGFYPSDIAVWWESFGTEWSSYKTTPPVLDSDGSFFLYSKLTVTKEEWQQGFVFSCSVMHEALHNHYTQKSLSLSPGK

SEQ ID NO: 76 - protein, 220 aa, Artificial Sequence
  Synthetic construct
PCPAPELLGGPSVFLFPPKPKDTLMISRTPEVTCVVVDVSHEDPEVKFNWYVDGVEVHNAKTKPREEQYNSTYRVVSVLTVLHQDWLNGKEYKCKVSNKALPAPIEKTISKAKGQPREPQVYTLPPSRDELTKNQVSLTCLVKGFYPSDIAVWWESYGTEWASYKTTPPVLDSDGSFFLYSKLTVTKEEWQQGFVFSCSVMHEALHNHYTQKSLSLSPGK

SEQ ID NO: 77 - protein, 220 aa, Artificial Sequence
  Synthetic construct
PCPAPELLGGPSVFLFPPKPKDTLMISRTPEVTCVVVDVSHEDPEVKFNWYVDGVEVHNAKTKPREEQYNSTYRVVSVLTVLHQDWLNGKEYKCKVSNKALPAPIEKTISKAKGQPREPQVYTLPPSRDELTKNQVSLTCLVKGFYPSDIAVWWESYGTEWVSYKTTPPVLDSDGSFFLYSKLTVTKEEWQQGFVFSCSVMHEALHNHYTQKSLSLSPGK

SEQ ID NO: 78 - protein, 220 aa, Artificial Sequence
  Synthetic construct
PCPAPELLGGPSVFLFPPKPKDTLMISRTPEVTCVVVDVSHEDPEVKFNWYVDGVEVHNAKTKPREEQYNSTYRVVSVLTVLHQDWLNGKEYKCKVSNKALPAPIEKTISKAKGQPREPQVYTLPPSRDELTKNQVSLTCLVKGFYPSDIAVWWESYGTEWSSYKTTPPVLDSDGSFFLYSKLTVSKEEWQQGFVFSCSVMHEALHNHYTQKSLSLSPGK

SEQ ID NO: 79 - protein, 220 aa, Artificial Sequence
  Synthetic construct
PCPAPELLGGPSVFLFPPKPKDTLMISRTPEVTCVVVDVSHEDPEVKFNWYVDGVEVHNAKTKPREEQYNSTYRVVSVLTVLHQDWLNGKEYKCKVSNKALPAPIEKTISKAKGQPREPQVYTLPPSRDELTKNQVSLTCLVKGFYPSDIAVWWESFGTEWASYKTTPPVLDSDGSFFLYSKLTVTKEEWQQGFVFSCSVMHEALHNHYTQKSLSLSPGK

SEQ ID NO: 80 - protein, 220 aa, Artificial Sequence
  Synthetic construct
PCPAPELLGGPSVFLFPPKPKDTLMISRTPEVTCVVVDVSHEDPEVKFNWYVDGVEVHNAKTKPREEQYNSTYRVVSVLTVLHQDWLNGKEYKCKVSNKALPAPIEKTISKAKGQPREPQVYTLPPSRDELTKNQVSLTCLVKGFYPSDIAVWWESFGTEWVSYKTTPPVLDSDGSFFLYSKLTVTKEEWQQGFVFSCSVMHEALHNHYTQKSLSLSPGK

SEQ ID NO: 81 - protein, 220 aa, Artificial Sequence
  Synthetic construct
PCPAPELLGGPSVFLFPPKPKDTLMISRTPEVTCVVVDVSHEDPEVKFNWYVDGVEVHNAKTKPREEQYNSTYRVVSVLTVLHQDWLNGKEYKCKVSNKALPAPIEKTISKAKGQPREPQVYTLPPSRDELTKNQVSLTCLVKGFYPSDIAVEWESFGTEWSNYKTTPPVLDSDGSFFLYSKLTVTKEEWQQGFVFSCSVMHEALHNHYTQKSLSLSPGK

SEQ ID NO: 82 - protein, 220 aa, Artificial Sequence
  Synthetic construct
PCPAPELLGGPSVFLFPPKPKDTLMISRTPEVTCVVVDVSHEDPEVKFNWYVDGVEVHNAKTKPREEQYNSTYRVVSVLTVLHQDWLNGKEYKCKVSNKALPAPIEKTISKAKGQPREPQVYTLPPSRDELTKNQVSLTCLVKGFYPSDIAVEWESYGTEWANYKTTPPVLDSDGSFFLYSKLTVTKEEWQQGFVFSCSVMHEALHNHYTQKSLSLSPGK

SEQ ID NO: 83 - protein, 220 aa, Artificial Sequence
  Synthetic construct
PCPAPELLGGPSVFLFPPKPKDTLMISRTPEVTCVVVDVSHEDPEVKFNWYVDGVEVHNAKTKPREEQYNSTYRVVSVLTVLHQDWLNGKEYKCKVSNKALPAPIEKTISKAKGQPREPQVYTLPPSRDELTKNQVSLTCLVKGFYPSDIAVEWESYGTEWVNYKTTPPVLDSDGSFFLYSKLTVTKEEWQQGFVFSCSVMHEALHNHYTQKSLSLSPGK

SEQ ID NO: 84 - protein, 220 aa, Artificial Sequence
  Synthetic construct
PCPAPELLGGPSVFLFPPKPKDTLMISRTPEVTCVVVDVSHEDPEVKFNWYVDGVEVHNAKTKPREEQYNSTYRVVSVLTVLHQDWLNGKEYKCKVSNKALPAPIEKTISKAKGQPREPQVYTLPPSRDELTKNQVSLTCLVKGFYPSDIAVEWESYGTEWSNYKTTPPVLDSDGSFFLYSKLTVSKEEWQQGFVFSCSVMHEALHNHYTQKSLSLSPGK

SEQ ID NO: 85 - protein, 220 aa, Artificial Sequence
  Synthetic construct
PCPAPELLGGPSVFLFPPKPKDTLMISRTPEVTCVVVDVSHEDPEVKFNWYVDGVEVHNAKTKPREEQYNSTYRVVSVLTVLHQDWLNGKEYKCKVSNKALPAPIEKTISKAKGQPREPQVYTLPPSRDELTKNQVSLTCLVKGFYPSDIAVEWESFGTEWANYKTTPPVLDSDGSFFLYSKLTVTKEEWQQGFVFSCSVMHEALHNHYTQKSLSLSPGK

SEQ ID NO: 86 - protein, 220 aa, Artificial Sequence
  Synthetic construct
PCPAPELLGGPSVFLFPPKPKDTLMISRTPEVTCVVVDVSHEDPEVKFNWYVDGVEVHNAKTKPREEQYNSTYRVVSVLTVLHQDWLNGKEYKCKVSNKALPAPIEKTISKAKGQPREPQVYTLPPSRDELTKNQVSLTCLVKGFYPSDIAVEWESFGTEWVNYKTTPPVLDSDGSFFLYSKLTVTKEEWQQGFVFSCSVMHEALHNHYTQKSLSLSPGK

SEQ ID NO: 87 - protein, 220 aa, Artificial Sequence
  Synthetic construct
PCPAPELLGGPSVFLFPPKPKDTLMISRTPEVTCVVVDVSHEDPEVKFNWYVDGVEVHNAKTKPREEQYNSTYRVVSVLTVLHQDWLNGKEYKCKVSNKALPAPIEKTISKAKGQPREPQVYTLPPSRDELTKNQVSLTCLVKGFYPSDIAVWWESFGTEWSNYKTTPPVLDSDGSFFLYSKLTVTKEEWQQGFVFSCSVMHEALHNHYTQKSLSLSPGK

SEQ ID NO: 88 - protein, 220 aa, Artificial Sequence
  Synthetic construct
PCPAPELLGGPSVFLFPPKPKDTLMISRTPEVTCVVVDVSHEDPEVKFNWYVDGVEVHNAKTKPREEQYNSTYRVVSVLTVLHQDWLNGKEYKCKVSNKALPAPIEKTISKAKGQPREPQVYTLPPSRDELTKNQVSLTCLVKGFYPSDIAVWWESYGTEWANYKTTPPVLDSDGSFFLYSKLTVTKEEWQQGFVFSCSVMHEALHNHYTQKSLSLSPGK

SEQ ID NO: 89 - protein, 220 aa, Artificial Sequence
  Synthetic construct
PCPAPELLGGPSVFLFPPKPKDTLMISRTPEVTCVVVDVSHEDPEVKFNWYVDGVEVHNAKTKPREEQYNSTYRVVSVLTVLHQDWLNGKEYKCKVSNKALPAPIEKTISKAKGQPREPQVYTLPPSRDELTKNQVSLTCLVKGFYPSDIAVWWESYGTEWVNYKTTPPVLDSDGSFFLYSKLTVTKEEWQQGFVFSCSVMHEALHNHYTQKSLSLSPGK

SEQ ID NO: 90 - protein, 220 aa, Artificial Sequence
  Synthetic construct
PCPAPELLGGPSVFLFPPKPKDTLMISRTPEVTCVVVDVSHEDPEVKFNWYVDGVEVHNAKTKPREEQYNSTYRVVSVLTVLHQDWLNGKEYKCKVSNKALPAPIEKTISKAKGQPREPQVYTLPPSRDELTKNQVSLTCLVKGFYPSDIAVWWESYGTEWSNYKTTPPVLDSDGSFFLYSKLTVSKEEWQQGFVFSCSVMHEALHNHYTQKSLSLSPGK

SEQ ID NO: 91 - protein, 220 aa, Artificial Sequence
  Synthetic construct
PCPAPELLGGPSVFLFPPKPKDTLMISRTPEVTCVVVDVSHEDPEVKFNWYVDGVEVHNAKTKPREEQYNSTYRVVSVLTVLHQDWLNGKEYKCKVSNKALPAPIEKTISKAKGQPREPQVYTLPPSRDELTKNQVSLTCLVKGFYPSDIAVWWESFGTEWANYKTTPPVLDSDGSFFLYSKLTVTKEEWQQGFVFSCSVMHEALHNHYTQKSLSLSPGK

SEQ ID NO: 92 - protein, 220 aa, Artificial Sequence
  Synthetic construct
PCPAPELLGGPSVFLFPPKPKDTLMISRTPEVTCVVVDVSHEDPEVKFNWYVDGVEVHNAKTKPREEQYNSTYRVVSVLTVLHQDWLNGKEYKCKVSNKALPAPIEKTISKAKGQPREPQVYTLPPSRDELTKNQVSLTCLVKGFYPSDIAVWWESFGTEWVNYKTTPPVLDSDGSFFLYSKLTVTKEEWQQGFVFSCSVMHEALHNHYTQKSLSLSPGK

SEQ ID NO: 93 - protein, 220 aa, Artificial Sequence
  Synthetic construct
PCPAPELLGGPSVFLFPPKPKDTLMISRTPEVTCVVVDVSHEDPEVKFNWYVDGVEVHNAKTKPREEQYNSTYRVVSVLTVLHQDWLNGKEYKCKVSNKALPAPIEKTISKAKGQPREPQVYTLPPSRDELTKNQVSLTCLVKGFYPSDIAVLWESFGTEWSSYKTTPPVLDSDGSFFLYSKLTVTKEEWQQGFVFSCSVMHEALHNHYTQKSLSLSPGK

SEQ ID NO: 94 - protein, 220 aa, Artificial Sequence
  Synthetic construct
PCPAPELLGGPSVFLFPPKPKDTLMISRTPEVTCVVVDVSHEDPEVKFNWYVDGVEVHNAKTKPREEQYNSTYRVVSVLTVLHQDWLNGKEYKCKVSNKALPAPIEKTISKAKGQPREPQVYTLPPSRDELTKNQVSLTCLVKGFYPSDIAVLWESYGTEWASYKTTPPVLDSDGSFFLYSKLTVTKEEWQQGFVFSCSVMHEALHNHYTQKSLSLSPGK

SEQ ID NO: 95 - protein, 220 aa, Artificial Sequence
  Synthetic construct
PCPAPELLGGPSVFLFPPKPKDTLMISRTPEVTCVVVDVSHEDPEVKFNWYVDGVEVHNAKTKPREEQYNSTYRVVSVLTVLHQDWLNGKEYKCKVSNKALPAPIEKTISKAKGQPREPQVYTLPPSRDELTKNQVSLTCLVKGFYPSDIAVLWESYGTEWVSYKTTPPVLDSDGSFFLYSKLTVTKEEWQQGFVFSCSVMHEALHNHYTQKSLSLSPGK

SEQ ID NO: 96 - protein, 220 aa, Artificial Sequence
  Synthetic construct
PCPAPELLGGPSVFLFPPKPKDTLMISRTPEVTCVVVDVSHEDPEVKFNWYVDGVEVHNAKTKPREEQYNSTYRVVSVLTVLHQDWLNGKEYKCKVSNKALPAPIEKTISKAKGQPREPQVYTLPPSRDELTKNQVSLTCLVKGFYPSDIAVLWESYGTEWSSYKTTPPVLDSDGSFFLYSKLTVSKEEWQQGFVFSCSVMHEALHNHYTQKSLSLSPGK

SEQ ID NO: 97 - protein, 220 aa, Artificial Sequence
  Synthetic construct
PCPAPELLGGPSVFLFPPKPKDTLMISRTPEVTCVVVDVSHEDPEVKFNWYVDGVEVHNAKTKPREEQYNSTYRVVSVLTVLHQDWLNGKEYKCKVSNKALPAPIEKTISKAKGQPREPQVYTLPPSRDELTKNQVSLTCLVKGFYPSDIAVLWESFGTEWASYKTTPPVLDSDGSFFLYSKLTVTKEEWQQGFVFSCSVMHEALHNHYTQKSLSLSPGK

SEQ ID NO: 98 - protein, 220 aa, Artificial Sequence
  Synthetic construct
PCPAPELLGGPSVFLFPPKPKDTLMISRTPEVTCVVVDVSHEDPEVKFNWYVDGVEVHNAKTKPREEQYNSTYRVVSVLTVLHQDWLNGKEYKCKVSNKALPAPIEKTISKAKGQPREPQVYTLPPSRDELTKNQVSLTCLVKGFYPSDIAVLWESFGTEWVSYKTTPPVLDSDGSFFLYSKLTVTKEEWQQGFVFSCSVMHEALHNHYTQKSLSLSPGK

SEQ ID NO: 99 - protein, 220 aa, Artificial Sequence; identical to SEQ ID NO: 27
  Synthetic construct

SEQ ID NO: 100 - protein, 220 aa, Artificial Sequence
  Synthetic construct
PCPAPELLGGPSVFLFPPKPKDTLMISRTPEVTCVVVDVSHEDPEVKFNWYVDGVEVHNAKTKPREEQYNSTYRVVSVLTVLHQDWLNGKEYKCKVSNKALPAPIEKTISKAKGQPREPQVYTLPPSRDELTKNQVSLTCLVKGFYPSDIAVWWESLGHVWVNQKTTPPVLDSDGSFFLYSKLTVPKSTWQQGWVFSCSVMHEALHNHYTQKSLSLSPGK

SEQ ID NO: 101 - protein, 220 aa, Artificial Sequence
  Synthetic construct
PCPAPELLGGPSVFLFPPKPKDTLMISRTPEVTCVVVDVSHEDPEVKFNWYVDGVEVHNAKTKPREEQYNSTYRVVSVLTVLHQDWLNGKEYKCKVSNKALPAPIEKTISKAKGQPREPQVYTLPPSRDELTKNQVSLTCLVKGFYPSDIAVEWESLGHVWVNQQTTPPVLDSDGSFFLYSKLTVPKSTWQQGWVFSCSVMHEALHNHYTQKSLSLSPGK

SEQ ID NO: 102 - protein, 220 aa, Artificial Sequence
  Synthetic construct
PCPAPELLGGPSVFLFPPKPKDTLMISRTPEVTCVVVDVSHEDPEVKFNWYVDGVEVHNAKTKPREEQYNSTYRVVSVLTVLHQDWLNGKEYKCKVSNKALPAPIEKTISKAKGQPREPQVYTLPPSRDELTKNQVSLTCLVKGFYPSDIAVWWESLGHVWVNQQTTPPVLDSDGSFFLYSKLTVPKSTWQQGWVFSCSVMHEALHNHYTQKSLSLSPGK

SEQ ID NO: 103 - protein, 760 aa, Macaca fascicularis
MMDQARSAFSNLFGGEPLSYTRFSLARQVDGDNSHVEMKLGVDEEENTDNNTKANGTKPKRCGGNICYGTIAVIIFFLIGFMIGYLGYCKGVEPKTECERLAGTESPAREEPEEDFPAAPRLYWDDLKRKLSEKLDTTDFTSTIKLLNENLYVPREAGSQKDENLALYIENQFREFKLSKVWRDQHFVKIQVKDSAQNSVIIVDKNGGLVYLVENPGGYVAYSKAATVTGKLVHANFGTKKDFEDLDSPVNGSIVIVRAGKITFAEKVANAESLNAIGVLIYMDQTKFPIVKADLSFFGHAHLGTGDPYTPGFPSFNHTQFPPSQSSGLPNIPVQTISRAAAEKLFGNMEGDCPSDWKTDSTCKMVTSENKSVKLTVSNVLKETKILNIFGVIKGFVEPDHYVVVGAQRDAWGPGAAKSSVGTALLLKLAQMFSDMVLKDGFQPSRSIIFASWSAGDFGSVGATEWLEGYLSSLHLKAFTYINLDKAVLGTSNFKVSASPLLYTLIEKTMQDVKHPVTGRSLYQDSNWASKVEKLTLDNAAFPFLAYSGIPAVSFCFCEDTDYPYLGTTMDTYKELVERIPELNKVARAAAEVAGQFVIKLTHDTELNLDYERYNSQLLLFLRDLNQYRADVKEMGLSLQWLYSARGDFFRATSRLTTDFRNAEKRDKFVMKKLNDRVMRVEYYFLSPYVSPKESPFRHVFWGSGSHTLSALLESLKLRRQNNSAFNETLFRNQLALATWTIQGAANALSGDVWDIDNEF

SEQ ID NO: 104 - protein, 186 aa, Artificial Sequence
  Synthetic construct
MGWSCIILFLVATATGAYAGTSSGLPNIPVQTISRAAAEKLFGNMEGDCPSDWKTDSTCRMVTSESKNVKLTVSNDSAQNSVIIVDKNGRLVYLVENPGGYVAYSKAATVTGKLVHANFGTKKDFEDLYTPVNGSIVIVRAGKITFAEKVANAESLNAIGVLIYMDQTKFPIVNAELSASHHHHHH

SEQ ID NO: 105 - protein, 247 aa, Artificial Sequence
  Synthetic construct
METDTLLLWVLLLWVPGSTGDKTHTCPPCPAPEAAGGPSVFLFPPKPKDTLYITREPEVTCVVVDVSHEDPEVKFNWYVDGVEVHNAKTKPREEQYNSTYRVVSVLTVLHQDWLNGKEYKCKVSNKALGAPIEKTISKAKGQPREPQVYTLPPSRDELTKNQVSLTCLVKGFYPSDIAVEWESLGHVWAVYKTTPPVLDSDGSFFLYSKLTVPKSTWQQGWVFSCSVMHEALHNHYTQKSLSLSPGK

SEQ ID NO: 106 - protein, 12 aa, Artificial Sequence
  Synthetic construct
  misc_feature (3)..(3): Xaa can be any naturally occurring amino acid
  misc_feature (5)..(6): Xaa can be any naturally occurring amino acid
  misc_feature (11)..(11): Xaa can be any naturally occurring amino acid
TVXKXXWQQGXV

SEQ ID NO: 107 - protein, 220 aa, Artificial Sequence
  Synthetic construct
PCPAPEAAGGPSVFLFPPKPKDTLYITREPEVTCVVVDVSHEDPEVKFNWYVDGVEVHNAKTKPREEQYNSTYRVVSVLTVLHQDWLNGKEYKCKVSNKALGAPIEKTISKAKGQPREPQVYTLPPSRDELTKNQVSLTCLVKGFYPSDIAVEWESYGTEWSSYKTTPPVLDSDGSFFLYSKLTVTKEEWQQGFVFSCSVMHEALHNHYTQKSLSLSPGK

SEQ ID NO: 108 - protein, 220 aa, Artificial Sequence
  Synthetic construct
PCPAPEAAGGPSVFLFPPKPKDTLYITREPEVTCVVVDVSHEDPEVKFNWYVDGVEVHNAKTKPREEQYNSTYRVVSVLTVLHQDWLNGKEYKCKVSNKALGAPIEKTISKAKGQPREPQVYTLPPSRDELTKNQVSLTCLVKGFYPSDIAVEWESFGTEWSSYKTTPPVLDSDGSFFLYSKLTVTKEEWQQGFVFSCSVMHEALHNHYTQKSLSLSPGK

SEQ ID NO: 109 - protein, 220 aa, Artificial Sequence
  Synthetic construct
PCPAPELLGGPSVFLFPPKPKDTLMISRTPEVTCVVVDVSHEDPEVKFNWYVDGVEVHNAKTKPREEQYNSTYRVVSVLTVLHQDWLNGKEYKCKVSNKALPAPIEKTISKAKGQPREPQVYTLPPSRDELTKNQVSLWCLVKGFYPSDIAVEWESFGTEWSSYKTTPPVLDSDGSFFLYSKLTVTKEEWQQGFVFSCSVMHEALHNHYTQKSLSLSPGK

SEQ ID NO: 110 - protein, 220 aa, Artificial Sequence
  Synthetic construct
PCPAPEAAGGPSVFLFPPKPKDTLMISRTPEVTCVVVDVSHEDPEVKFNWYVDGVEVHNAKTKPREEQYNSTYRVVSVLTVLHQDWLNGKEYKCKVSNKALPAPIEKTISKAKGQPREPQVYTLPPSRDELTKNQVSLWCLVKGFYPSDIAVEWESFGTEWSSYKTTPPVLDSDGSFFLYSKLTVTKEEWQQGFVFSCSVMHEALHNHYTQKSLSLSPGK

SEQ ID NO: 111 - protein, 220 aa, Artificial Sequence
  Synthetic construct
PCPAPEAAGGPSVFLFPPKPKDTLMISRTPEVTCVVVDVSHEDPEVKFNWYVDGVEVHNAKTKPREEQYNSTYRVVSVLTVLHQDWLNGKEYKCKVSNKALGAPIEKTISKAKGQPREPQVYTLPPSRDELTKNQVSLWCLVKGFYPSDIAVEWESFGTEWSSYKTTPPVLDSDGSFFLYSKLTVTKEEWQQGFVFSCSVMHEALHNHYTQKSLSLSPGK

SEQ ID NO: 112 - protein, 220 aa, Artificial Sequence
  Synthetic construct
PCPAPELLGGPSVFLFPPKPKDTLYITREPEVTCVVVDVSHEDPEVKFNWYVDGVEVHNAKTKPREEQYNSTYRVVSVLTVLHQDWLNGKEYKCKVSNKALPAPIEKTISKAKGQPREPQVYTLPPSRDELTKNQVSLWCLVKGFYPSDIAVEWESFGTEWSSYKTTPPVLDSDGSFFLYSKLTVTKEEWQQGFVFSCSVMHEALHNHYTQKSLSLSPGK

SEQ ID NO: 113 - protein, 220 aa, Artificial Sequence
  Synthetic construct
PCPAPEAAGGPSVFLFPPKPKDTLYITREPEVTCVVVDVSHEDPEVKFNWYVDGVEVHNAKTKPREEQYNSTYRVVSVLTVLHQDWLNGKEYKCKVSNKALPAPIEKTISKAKGQPREPQVYTLPPSRDELTKNQVSLWCLVKGFYPSDIAVEWESFGTEWSSYKTTPPVLDSDGSFFLYSKLTVTKEEWQQGFVFSCSVMHEALHNHYTQKSLSLSPGK

SEQ ID NO: 114 - protein, 220 aa, Artificial Sequence
  Synthetic construct
PCPAPEAAGGPSVFLFPPKPKDTLYITREPEVTCVVVDVSHEDPEVKFNWYVDGVEVHNAKTKPREEQYNSTYRVVSVLTVLHQDWLNGKEYKCKVSNKALGAPIEKTISKAKGQPREPQVYTLPPSRDELTKNQVSLWCLVKGFYPSDIAVEWESFGTEWSSYKTTPPVLDSDGSFFLYSKLTVTKEEWQQGFVFSCSVMHEALHNHYTQKSLSLSPGK

SEQ ID NO: 115 - protein, 220 aa, Artificial Sequence
  Synthetic construct
PCPAPELLGGPSVFLFPPKPKDTLMISRTPEVTCVVVDVSHEDPEVKFNWYVDGVEVHNAKTKPREEQYNSTYRVVSVLTVLHQDWLNGKEYKCKVSNKALPAPIEKTISKAKGQPREPQVYTLPPSRDELTKNQVSLSCAVKGFYPSDIAVEWESFGTEWSSYKTTPPVLDSDGSFFLVSKLTVTKEEWQQGFVFSCSVMHEALHNHYTQKSLSLSPGK

SEQ ID NO: 116 - protein, 220 aa, Artificial Sequence
  Synthetic construct
PCPAPEAAGGPSVFLFPPKPKDTLMISRTPEVTCVVVDVSHEDPEVKFNWYVDGVEVHNAKTKPREEQYNSTYRVVSVLTVLHQDWLNGKEYKCKVSNKALPAPIEKTISKAKGQPREPQVYTLPPSRDELTKNQVSLSCAVKGFYPSDIAVEWESFGTEWSSYKTTPPVLDSDGSFFLVSKLTVTKEEWQQGFVFSCSVMHEALHNHYTQKSLSLSPGK

SEQ ID NO: 117 - protein, 220 aa, Artificial Sequence
  Synthetic construct
PCPAPEAAGGPSVFLFPPKPKDTLMISRTPEVTCVVVDVSHEDPEVKFNWYVDGVEVHNAKTKPREEQYNSTYRVVSVLTVLHQDWLNGKEYKCKVSNKALGAPIEKTISKAKGQPREPQVYTLPPSRDELTKNQVSLSCAVKGFYPSDIAVEWESFGTEWSSYKTTPPVLDSDGSFFLVSKLTVTKEEWQQGFVFSCSVMHEALHNHYTQKSLSLSPGK

SEQ ID NO: 118 - protein, 220 aa, Artificial Sequence
  Synthetic construct
PCPAPELLGGPSVFLFPPKPKDTLYITREPEVTCVVVDVSHEDPEVKFNWYVDGVEVHNAKTKPREEQYNSTYRVVSVLTVLHQDWLNGKEYKCKVSNKALPAPIEKTISKAKGQPREPQVYTLPPSRDELTKNQVSLSCAVKGFYPSDIAVEWESFGTEWSSYKTTPPVLDSDGSFFLVSKLTVTKEEWQQGFVFSCSVMHEALHNHYTQKSLSLSPGK

SEQ ID NO: 119 - protein, 220 aa, Artificial Sequence
  Synthetic construct
PCPAPEAAGGPSVFLFPPKPKDTLYITREPEVTCVVVDVSHEDPEVKFNWYVDGVEVHNAKTKPREEQYNSTYRVVSVLTVLHQDWLNGKEYKCKVSNKALPAPIEKTISKAKGQPREPQVYTLPPSRDELTKNQVSLSCAVKGFYPSDIAVEWESFGTEWSSYKTTPPVLDSDGSFFLVSKLTVTKEEWQQGFVFSCSVMHEALHNHYTQKSLSLSPGK

SEQ ID NO: 120 - protein, 220 aa, Artificial Sequence
  Synthetic construct
PCPAPEAAGGPSVFLFPPKPKDTLYITREPEVTCVVVDVSHEDPEVKFNWYVDGVEVHNAKTKPREEQYNSTYRVVSVLTVLHQDWLNGKEYKCKVSNKALGAPIEKTISKAKGQPREPQVYTLPPSRDELTKNQVSLSCAVKGFYPSDIAVEWESFGTEWSSYKTTPPVLDSDGSFFLVSKLTVTKEEWQQGFVFSCSVMHEALHNHYTQKSLSLSPGK

SEQ ID NO: 121 - protein, 220 aa, Artificial Sequence
  Synthetic construct
PCPAPELLGGPSVFLFPPKPKDTLMISRTPEVTCVVVDVSHEDPEVKFNWYVDGVEVHNAKTKPREEQYNSTYRVVSVLTVLHQDWLNGKEYKCKVSNKALPAPIEKTISKAKGQPREPQVYTLPPSRDELTKNQVSLWCLVKGFYPSDIAVEWESYGTEWANYKTTPPVLDSDGSFFLYSKLTVTKEEWQQGFVFSCSVMHEALHNHYTQKSLSLSPGK

SEQ ID NO: 122 - protein, 220 aa, Artificial Sequence
  Synthetic construct
PCPAPEAAGGPSVFLFPPKPKDTLMISRTPEVTCVVVDVSHEDPEVKFNWYVDGVEVHNAKTKPREEQYNSTYRVVSVLTVLHQDWLNGKEYKCKVSNKALPAPIEKTISKAKGQPREPQVYTLPPSRDELTKNQVSLWCLVKGFYPSDIAVEWESYGTEWANYKTTPPVLDSDGSFFLYSKLTVTKEEWQQGFVFSCSVMHEALHNHYTQKSLSLSPGK

SEQ ID NO: 123 - protein, 220 aa, Artificial Sequence
  Synthetic construct
PCPAPEAAGGPSVFLFPPKPKDTLMISRTPEVTCVVVDVSHEDPEVKFNWYVDGVEVHNAKTKPREEQYNSTYRVVSVLTVLHQDWLNGKEYKCKVSNKALGAPIEKTISKAKGQPREPQVYTLPPSRDELTKNQVSLWCLVKGFYPSDIAVEWESYGTEWANYKTTPPVLDSDGSFFLYSKLTVTKEEWQQGFVFSCSVMHEALHNHYTQKSLSLSPGK

SEQ ID NO: 124 - protein, 220 aa, Artificial Sequence
  Synthetic construct
PCPAPELLGGPSVFLFPPKPKDTLYITREPEVTCVVVDVSHEDPEVKFNWYVDGVEVHNAKTKPREEQYNSTYRVVSVLTVLHQDWLNGKEYKCKVSNKALPAPIEKTISKAKGQPREPQVYTLPPSRDELTKNQVSLWCLVKGFYPSDIAVEWESYGTEWANYKTTPPVLDSDGSFFLYSKLTVTKEEWQQGFVFSCSVMHEALHNHYTQKSLSLSPGK

SEQ ID NO: 125 - protein, 220 aa, Artificial Sequence
  Synthetic construct
PCPAPEAAGGPSVFLFPPKPKDTLYITREPEVTCVVVDVSHEDPEVKFNWYVDGVEVHNAKTKPREEQYNSTYRVVSVLTVLHQDWLNGKEYKCKVSNKALPAPIEKTISKAKGQPREPQVYTLPPSRDELTKNQVSLWCLVKGFYPSDIAVEWESYGTEWANYKTTPPVLDSDGSFFLYSKLTVTKEEWQQGFVFSCSVMHEALHNHYTQKSLSLSPGK

SEQ ID NO: 126 - protein, 220 aa, Artificial Sequence
  Synthetic construct
PCPAPEAAGGPSVFLFPPKPKDTLYITREPEVTCVVVDVSHEDPEVKFNWYVDGVEVHNAKTKPREEQYNSTYRVVSVLTVLHQDWLNGKEYKCKVSNKALGAPIEKTISKAKGQPREPQVYTLPPSRDELTKNQVSLWCLVKGFYPSDIAVEWESYGTEWANYKTTPPVLDSDGSFFLYSKLTVTKEEWQQGFVFSCSVMHEALHNHYTQKSLSLSPGK

SEQ ID NO: 127 - protein, 220 aa, Artificial Sequence
  Synthetic construct
PCPAPELLGGPSVFLFPPKPKDTLMISRTPEVTCVVVDVSHEDPEVKFNWYVDGVEVHNAKTKPREEQYNSTYRVVSVLTVLHQDWLNGKEYKCKVSNKALPAPIEKTISKAKGQPREPQVYTLPPSRDELTKNQVSLSCAVKGFYPSDIAVEWESYGTEWANYKTTPPVLDSDGSFFLVSKLTVTKEEWQQGFVFSCSVMHEALHNHYTQKSLSLSPGK

SEQ ID NO: 128 - protein, 220 aa, Artificial Sequence
  Synthetic construct
PCPAPEAAGGPSVFLFPPKPKDTLMISRTPEVTCVVVDVSHEDPEVKFNWYVDGVEVHNAKTKPREEQYNSTYRVVSVLTVLHQDWLNGKEYKCKVSNKALPAPIEKTISKAKGQPREPQVYTLPPSRDELTKNQVSLSCAVKGFYPSDIAVEWESYGTEWANYKTTPPVLDSDGSFFLVSKLTVTKEEWQQGFVFSCSVMHEALHNHYTQKSLSLSPGK

SEQ ID NO: 129 - protein, 220 aa, Artificial Sequence
  Synthetic construct
PCPAPEAAGGPSVFLFPPKPKDTLMISRTPEVTCVVVDVSHEDPEVKFNWYVDGVEVHNAKTKPREEQYNSTYRVVSVLTVLHQDWLNGKEYKCKVSNKALGAPIEKTISKAKGQPREPQVYTLPPSRDELTKNQVSLSCAVKGFYPSDIAVEWESYGTEWANYKTTPPVLDSDGSFFLVSKLTVTKEEWQQGFVFSCSVMHEALHNHYTQKSLSLSPGK

SEQ ID NO: 130 - protein, 220 aa, Artificial Sequence
  Synthetic construct
PCPAPELLGGPSVFLFPPKPKDTLYITREPEVTCVVVDVSHEDPEVKFNWYVDGVEVHNAKTKPREEQYNSTYRVVSVLTVLHQDWLNGKEYKCKVSNKALPAPIEKTISKAKGQPREPQVYTLPPSRDELTKNQVSLSCAVKGFYPSDIAVEWESYGTEWANYKTTPPVLDSDGSFFLVSKLTVTKEEWQQGFVFSCSVMHEALHNHYTQKSLSLSPGK

SEQ ID NO: 131 - protein, 220 aa, Artificial Sequence
  Synthetic construct
PCPAPEAAGGPSVFLFPPKPKDTLYITREPEVTCVVVDVSHEDPEVKFNWYVDGVEVHNAKTKPREEQYNSTYRVVSVLTVLHQDWLNGKEYKCKVSNKALPAPIEKTISKAKGQPREPQVYTLPPSRDELTKNQVSLSCAVKGFYPSDIAVEWESYGTEWANYKTTPPVLDSDGSFFLVSKLTVTKEEWQQGFVFSCSVMHEALHNHYTQKSLSLSPGK

SEQ ID NO: 132 - protein, 220 aa, Artificial Sequence
  Synthetic construct
PCPAPEAAGGPSVFLFPPKPKDTLYITREPEVTCVVVDVSHEDPEVKFNWYVDGVEVHNAKTKPREEQYNSTYRVVSVLTVLHQDWLNGKEYKCKVSNKALGAPIEKTISKAKGQPREPQVYTLPPSRDELTKNQVSLSCAVKGFYPSDIAVEWESYGTEWANYKTTPPVLDSDGSFFLVSKLTVTKEEWQQGFVFSCSVMHEALHNHYTQKSLSLSPGK

SEQ ID NO: 133 - protein, 220 aa, Artificial Sequence
  Synthetic construct
PCPAPELLGGPSVFLFPPKPKDTLMISRTPEVTCVVVDVSHEDPEVKFNWYVDGVEVHNAKTKPREEQYNSTYRVVSVLTVLHQDWLNGKEYKCKVSNKALPAPIEKTISKAKGQPREPQVYTLPPSRDELTKNQVSLWCLVKGFYPSDIAVEWESYGTEWVNYKTTPPVLDSDGSFFLYSKLTVTKEEWQQGFVFSCSVMHEALHNHYTQKSLSLSPGK

SEQ ID NO: 134 - protein, 220 aa, Artificial Sequence
  Synthetic construct
PCPAPEAAGGPSVFLFPPKPKDTLMISRTPEVTCVVVDVSHEDPEVKFNWYVDGVEVHNAKTKPREEQYNSTYRVVSVLTVLHQDWLNGKEYKCKVSNKALPAPIEKTISKAKGQPREPQVYTLPPSRDELTKNQVSLWCLVKGFYPSDIAVEWESYGTEWVNYKTTPPVLDSDGSFFLYSKLTVTKEEWQQGFVFSCSVMHEALHNHYTQKSLSLSPGK

SEQ ID NO: 135 - protein, 220 aa, Artificial Sequence
  Synthetic construct
PCPAPEAAGGPSVFLFPPKPKDTLMISRTPEVTCVVVDVSHEDPEVKFNWYVDGVEVHNAKTKPREEQYNSTYRVVSVLTVLHQDWLNGKEYKCKVSNKALGAPIEKTISKAKGQPREPQVYTLPPSRDELTKNQVSLWCLVKGFYPSDIAVEWESYGTEWVNYKTTPPVLDSDGSFFLYSKLTVTKEEWQQGFVFSCSVMHEALHNHYTQKSLSLSPGK

SEQ ID NO: 136 - protein, 220 aa, Artificial Sequence
  Synthetic construct
PCPAPELLGGPSVFLFPPKPKDTLYITREPEVTCVVVDVSHEDPEVKFNWYVDGVEVHNAKTKPREEQYNSTYRVVSVLTVLHQDWLNGKEYKCKVSNKALPAPIEKTISKAKGQPREPQVYTLPPSRDELTKNQVSLWCLVKGFYPSDIAVEWESYGTEWVNYKTTPPVLDSDGSFFLYSKLTVTKEEWQQGFVFSCSVMHEALHNHYTQKSLSLSPGK

SEQ ID NO: 137 - protein, 220 aa, Artificial Sequence
  Synthetic construct
PCPAPEAAGGPSVFLFPPKPKDTLYITREPEVTCVVVDVSHEDPEVKFNWYVDGVEVHNAKTKPREEQYNSTYRVVSVLTVLHQDWLNGKEYKCKVSNKALPAPIEKTISKAKGQPREPQVYTLPPSRDELTKNQVSLWCLVKGFYPSDIAVEWESYGTEWVNYKTTPPVLDSDGSFFLYSKLTVTKEEWQQGFVFSCSVMHEALHNHYTQKSLSLSPGK

SEQ ID NO: 138 - protein, 220 aa, Artificial Sequence
  Synthetic construct
PCPAPEAAGGPSVFLFPPKPKDTLYITREPEVTCVVVDVSHEDPEVKFNWYVDGVEVHNAKTKPREEQYNSTYRVVSVLTVLHQDWLNGKEYKCKVSNKALGAPIEKTISKAKGQPREPQVYTLPPSRDELTKNQVSLWCLVKGFYPSDIAVEWESYGTEWVNYKTTPPVLDSDGSFFLYSKLTVTKEEWQQGFVFSCSVMHEALHNHYTQKSLSLSPGK

SEQ ID NO: 139 - protein, 220 aa, Artificial Sequence
  Synthetic construct
PCPAPELLGGPSVFLFPPKPKDTLMISRTPEVTCVVVDVSHEDPEVKFNWYVDGVEVHNAKTKPREEQYNSTYRVVSVLTVLHQDWLNGKEYKCKVSNKALPAPIEKTISKAKGQPREPQVYTLPPSRDELTKNQVSLSCAVKGFYPSDIAVEWESYGTEWVNYKTTPPVLDSDGSFFLVSKLTVTKEEWQQGFVFSCSVMHEALHNHYTQKSLSLSPGK

SEQ ID NO: 140 - protein, 220 aa, Artificial Sequence
  Synthetic construct
PCPAPEAAGGPSVFLFPPKPKDTLMISRTPEVTCVVVDVSHEDPEVKFNWYVDGVEVHNAKTKPREEQYNSTYRVVSVLTVLHQDWLNGKEYKCKVSNKALPAPIEKTISKAKGQPREPQVYTLPPSRDELTKNQVSLSCAVKGFYPSDIAVEWESYGTEWVNYKTTPPVLDSDGSFFLVSKLTVTKEEWQQGFVFSCSVMHEALHNHYTQKSLSLSPGK

SEQ ID NO: 141 - protein, 220 aa, Artificial Sequence
  Synthetic construct
PCPAPEAAGGPSVFLFPPKPKDTLMISRTPEVTCVVVDVSHEDPEVKFNWYVDGVEVHNAKTKPREEQYNSTYRVVSVLTVLHQDWLNGKEYKCKVSNKALGAPIEKTISKAKGQPREPQVYTLPPSRDELTKNQVSLSCAVKGFYPSDIAVEWESYGTEWVNYKTTPPVLDSDGSFFLVSKLTVTKEEWQQGFVFSCSVMHEALHNHYTQKSLSLSPGK

SEQ ID NO: 142 - protein, 220 aa, Artificial Sequence
  Synthetic construct
PCPAPELLGGPSVFLFPPKPKDTLYITREPEVTCVVVDVSHEDPEVKFNWYVDGVEVHNAKTKPREEQYNSTYRVVSVLTVLHQDWLNGKEYKCKVSNKALPAPIEKTISKAKGQPREPQVYTLPPSRDELTKNQVSLSCAVKGFYPSDIAVEWESYGTEWVNYKTTPPVLDSDGSFFLVSKLTVTKEEWQQGFVFSCSVMHEALHNHYTQKSLSLSPGK

SEQ ID NO: 143 - protein, 220 aa, Artificial Sequence
  Synthetic construct
PCPAPEAAGGPSVFLFPPKPKDTLYITREPEVTCVVVDVSHEDPEVKFNWYVDGVEVHNAKTKPREEQYNSTYRVVSVLTVLHQDWLNGKEYKCKVSNKALPAPIEKTISKAKGQPREPQVYTLPPSRDELTKNQVSLSCAVKGFYPSDIAVEWESYGTEWVNYKTTPPVLDSDGSFFLVSKLTVTKEEWQQGFVFSCSVMHEALHNHYTQKSLSLSPGK

SEQ ID NO: 144 - protein, 220 aa, Artificial Sequence
  Synthetic construct
PCPAPEAAGGPSVFLFPPKPKDTLYITREPEVTCVVVDVSHEDPEVKFNWYVDGVEVHNAKTKPREEQYNSTYRVVSVLTVLHQDWLNGKEYKCKVSNKALGAPIEKTISKAKGQPREPQVYTLPPSRDELTKNQVSLSCAVKGFYPSDIAVEWESYGTEWVNYKTTPPVLDSDGSFFLVSKLTVTKEEWQQGFVFSCSVMHEALHNHYTQKSLSLSPGK

SEQ ID NO: 145 - protein, 220 aa, Artificial Sequence
  Synthetic construct
PCPAPELLGGPSVFLFPPKPKDTLMISRTPEVTCVVVDVSHEDPEVKFNWYVDGVEVHNAKTKPREEQYNSTYRVVSVLTVLHQDWLNGKEYKCKVSNKALPAPIEKTISKAKGQPREPQVYTLPPSRDELTKNQVSLWCLVKGFYPSDIAVEWESYGTEWSNYKTTPPVLDSDGSFFLYSKLTVSKEEWQQGFVFSCSVMHEALHNHYTQKSLSLSPGK

SEQ ID NO: 146 - protein, 220 aa, Artificial Sequence
  Synthetic construct
PCPAPEAAGGPSVFLFPPKPKDTLMISRTPEVTCVVVDVSHEDPEVKFNWYVDGVEVHNAKTKPREEQYNSTYRVVSVLTVLHQDWLNGKEYKCKVSNKALPAPIEKTISKAKGQPREPQVYTLPPSRDELTKNQVSLWCLVKGFYPSDIAVEWESYGTEWSNYKTTPPVLDSDGSFFLYSKLTVSKEEWQQGFVFSCSVMHEALHNHYTQKSLSLSPGK

SEQ ID NO: 147 - protein, 220 aa, Artificial Sequence
  Synthetic construct
PCPAPEAAGGPSVFLFPPKPKDTLMISRTPEVTCVVVDVSHEDPEVKFNWYVDGVEVHNAKTKPREEQYNSTYRVVSVLTVLHQDWLNGKEYKCKVSNKALGAPIEKTISKAKGQPREPQVYTLPPSRDELTKNQVSLWCLVKGFYPSDIAVEWESYGTEWSNYKTTPPVLDSDGSFFLYSKLTVSKEEWQQGFVFSCSVMHEALHNHYTQKSLSLSPGK

SEQ ID NO: 148 - protein, 220 aa, Artificial Sequence
  Synthetic construct
PCPAPELLGGPSVFLFPPKPKDTLYITREPEVTCVVVDVSHEDPEVKFNWYVDGVEVHNAKTKPREEQYNSTYRVVSVLTVLHQDWLNGKEYKCKVSNKALPAPIEKTISKAKGQPREPQVYTLPPSRDELTKNQVSLWCLVKGFYPSDIAVEWESYGTEWSNYKTTPPVLDSDGSFFLYSKLTVSKEEWQQGFVFSCSVMHEALHNHYTQKSLSLSPGK

SEQ ID NO: 149 - protein, 220 aa, Artificial Sequence
  Synthetic construct
PCPAPEAAGGPSVFLFPPKPKDTLYITREPEVTCVVVDVSHEDPEVKFNWYVDGVEVHNAKTKPREEQYNSTYRVVSVLTVLHQDWLNGKEYKCKVSNKALPAPIEKTISKAKGQPREPQVYTLPPSRDELTKNQVSLWCLVKGFYPSDIAVEWESYGTEWSNYKTTPPVLDSDGSFFLYSKLTVSKEEWQQGFVFSCSVMHEALHNHYTQKSLSLSPGK

SEQ ID NO: 150 - protein, 220 aa, Artificial Sequence
  Synthetic construct
PCPAPEAAGGPSVFLFPPKPKDTLYITREPEVTCVVVDVSHEDPEVKFNWYVDGVEVHNAKTKPREEQYNSTYRVVSVLTVLHQDWLNGKEYKCKVSNKALGAPIEKTISKAKGQPREPQVYTLPPSRDELTKNQVSLWCLVKGFYPSDIAVEWESYGTEWSNYKTTPPVLDSDGSFFLYSKLTVSKEEWQQGFVFSCSVMHEALHNHYTQKSLSLSPGK

SEQ ID NO: 151 - protein, 220 aa, Artificial Sequence
  Synthetic construct
PCPAPELLGGPSVFLFPPKPKDTLMISRTPEVTCVVVDVSHEDPEVKFNWYVDGVEVHNAKTKPREEQYNSTYRVVSVLTVLHQDWLNGKEYKCKVSNKALPAPIEKTISKAKGQPREPQVYTLPPSRDELTKNQVSLSCAVKGFYPSDIAVEWESYGTEWSNYKTTPPVLDSDGSFFLVSKLTVSKEEWQQGFVFSCSVMHEALHNHYTQKSLSLSPGK

SEQ ID NO: 152 - protein, 220 aa, Artificial Sequence
  Synthetic construct
PCPAPEAAGGPSVFLFPPKPKDTLMISRTPEVTCVVVDVSHEDPEVKFNWYVDGVEVHNAKTKPREEQYNSTYRVVSVLTVLHQDWLNGKEYKCKVSNKALPAPIEKTISKAKGQPREPQVYTLPPSRDELTKNQVSLSCAVKGFYPSDIAVEWESYGTEWSNYKTTPPVLDSDGSFFLVSKLTVSKEEWQQGFVFSCSVMHEALHNHYTQKSLSLSPGK

SEQ ID NO: 153 - protein, 220 aa, Artificial Sequence
  Synthetic construct
PCPAPEAAGGPSVFLFPPKPKDTLMISRTPEVTCVVVDVSHEDPEVKFNWYVDGVEVHNAKTKPREEQYNSTYRVVSVLTVLHQDWLNGKEYKCKVSNKALGAPIEKTISKAKGQPREPQVYTLPPSRDELTKNQVSLSCAVKGFYPSDIAVEWESYGTEWSNYKTTPPVLDSDGSFFLVSKLTVSKEEWQQGFVFSCSVMHEALHNHYTQKSLSLSPGK

SEQ ID NO: 154 - protein, 220 aa, Artificial Sequence
  Synthetic construct
PCPAPELLGGPSVFLFPPKPKDTLYITREPEVTCVVVDVSHEDPEVKFNWYVDGVEVHNAKTKPREEQYNSTYRVVSVLTVLHQDWLNGKEYKCKVSNKALPAPIEKTISKAKGQPREPQVYTLPPSRDELTKNQVSLSCAVKGFYPSDIAVEWESYGTEWSNYKTTPPVLDSDGSFFLVSKLTVSKEEWQQGFVFSCSVMHEALHNHYTQKSLSLSPGK

SEQ ID NO: 155 - protein, 220 aa, Artificial Sequence
  Synthetic construct
PCPAPEAAGGPSVFLFPPKPKDTLYITREPEVTCVVVDVSHEDPEVKFNWYVDGVEVHNAKTKPREEQYNSTYRVVSVLTVLHQDWLNGKEYKCKVSNKALPAPIEKTISKAKGQPREPQVYTLPPSRDELTKNQVSLSCAVKGFYPSDIAVEWESYGTEWSNYKTTPPVLDSDGSFFLVSKLTVSKEEWQQGFVFSCSVMHEALHNHYTQKSLSLSPGK

SEQ ID NO: 156 - protein, 220 aa, Artificial Sequence
  Synthetic construct
PCPAPEAAGGPSVFLFPPKPKDTLYITREPEVTCVVVDVSHEDPEVKFNWYVDGVEVHNAKTKPREEQYNSTYRVVSVLTVLHQDWLNGKEYKCKVSNKALGAPIEKTISKAKGQPREPQVYTLPPSRDELTKNQVSLSCAVKGFYPSDIAVEWESYGTEWSNYKTTPPVLDSDGSFFLVSKLTVSKEEWQQGFVFSCSVMHEALHNHYTQKSLSLSPGK

SEQ ID NO: 157 - protein, 220 aa, Artificial Sequence
  Synthetic construct
PCPAPELLGGPSVFLFPPKPKDTLMISRTPEVTCVVVDVSHEDPEVKFNWYVDGVEVHNAKTKPREEQYNSTYRVVSVLTVLHQDWLNGKEYKCKVSNKALPAPIEKTISKAKGQPREPQVYTLPPSRDELTKNQVSLWCLVKGFYPSDIAVLWESYGTEWASYKTTPPVLDSDGSFFLYSKLTVTKEEWQQGFVFSCSVMHEALHNHYTQKSLSLSPGK

SEQ ID NO: 158 - protein, 220 aa, Artificial Sequence
  Synthetic construct
PCPAPEAAGGPSVFLFPPKPKDTLMISRTPEVTCVVVDVSHEDPEVKFNWYVDGVEVHNAKTKPREEQYNSTYRVVSVLTVLHQDWLNGKEYKCKVSNKALPAPIEKTISKAKGQPREPQVYTLPPSRDELTKNQVSLWCLVKGFYPSDIAVLWESYGTEWASYKTTPPVLDSDGSFFLYSKLTVTKEEWQQGFVFSCSVMHEALHNHYTQKSLSLSPGK

SEQ ID NO: 159 - protein, 220 aa, Artificial Sequence
  Synthetic construct
PCPAPEAAGGPSVFLFPPKPKDTLMISRTPEVTCVVVDVSHEDPEVKFNWYVDGVEVHNAKTKPREEQYNSTYRVVSVLTVLHQDWLNGKEYKCKVSNKALGAPIEKTISKAKGQPREPQVYTLPPSRDELTKNQVSLWCLVKGFYPSDIAVLWESYGTEWASYKTTPPVLDSDGSFFLYSKLTVTKEEWQQGFVFSCSVMHEALHNHYTQKSLSLSPGK

SEQ ID NO: 160 - protein, 220 aa, Artificial Sequence
  Synthetic construct
PCPAPELLGGPSVFLFPPKPKDTLYITREPEVTCVVVDVSHEDPEVKFNWYVDGVEVHNAKTKPREEQYNSTYRVVSVLTVLHQDWLNGKEYKCKVSNKALPAPIEKTISKAKGQPREPQVYTLPPSRDELTKNQVSLWCLVKGFYPSDIAVLWESYGTEWASYKTTPPVLDSDGSFFLYSKLTVTKEEWQQGFVFSCSVMHEALHNHYTQKSLSLSPGK

SEQ ID NO: 161 - protein, 220 aa, Artificial Sequence
  Synthetic construct
PCPAPEAAGGPSVFLFPPKPKDTLYITREPEVTCVVVDVSHEDPEVKFNWYVDGVEVHNAKTKPREEQYNSTYRVVSVLTVLHQDWLNGKEYKCKVSNKALPAPIEKTISKAKGQPREPQVYTLPPSRDELTKNQVSLWCLVKGFYPSDIAVLWESYGTEWASYKTTPPVLDSDGSFFLYSKLTVTKEEWQQGFVFSCSVMHEALHNHYTQKSLSLSPGK

SEQ ID NO: 162 - protein, 220 aa, Artificial Sequence
  Synthetic construct
PCPAPEAAGGPSVFLFPPKPKDTLYITREPEVTCVVVDVSHEDPEVKFNWYVDGVEVHNAKTKPREEQYNSTYRVVSVLTVLHQDWLNGKEYKCKVSNKALGAPIEKTISKAKGQPREPQVYTLPPSRDELTKNQVSLWCLVKGFYPSDIAVLWESYGTEWASYKTTPPVLDSDGSFFLYSKLTVTKEEWQQGFVFSCSVMHEALHNHYTQKSLSLSPGK

SEQ ID NO: 163 - protein, 220 aa, Artificial Sequence
  Synthetic construct
PCPAPELLGGPSVFLFPPKPKDTLMISRTPEVTCVVVDVSHEDPEVKFNWYVDGVEVHNAKTKPREEQYNSTYRVVSVLTVLHQDWLNGKEYKCKVSNKALPAPIEKTISKAKGQPREPQVYTLPPSRDELTKNQVSLSCAVKGFYPSDIAVLWESYGTEWASYKTTPPVLDSDGSFFLVSKLTVTKEEWQQGFVFSCSVMHEALHNHYTQKSLSLSPGK

SEQ ID NO: 164 - protein, 220 aa, Artificial Sequence
  Synthetic construct
PCPAPEAAGGPSVFLFPPKPKDTLMISRTPEVTCVVVDVSHEDPEVKFNWYVDGVEVHNAKTKPREEQYNSTYRVVSVLTVLHQDWLNGKEYKCKVSNKALPAPIEKTISKAKGQPREPQVYTLPPSRDELTKNQVSLSCAVKGFYPSDIAVLWESYGTEWASYKTTPPVLDSDGSFFLVSKLTVTKEEWQQGFVFSCSVMHEALHNHYTQKSLSLSPGK

SEQ ID NO: 165 - protein, 220 aa, Artificial Sequence
  Synthetic construct
PCPAPEAAGGPSVFLFPPKPKDTLMISRTPEVTCVVVDVSHEDPEVKFNWYVDGVEVHNAKTKPREEQYNSTYRVVSVLTVLHQDWLNGKEYKCKVSNKALGAPIEKTISKAKGQPREPQVYTLPPSRDELTKNQVSLSCAVKGFYPSDIAVLWESYGTEWASYKTTPPVLDSDGSFFLVSKLTVTKEEWQQGFVFSCSVMHEALHNHYTQKSLSLSPGK

SEQ ID NO: 166 - protein, 220 aa, Artificial Sequence
  Synthetic construct
PCPAPELLGGPSVFLFPPKPKDTLYITREPEVTCVVVDVSHEDPEVKFNWYVDGVEVHNAKTKPREEQYNSTYRVVSVLTVLHQDWLNGKEYKCKVSNKALPAPIEKTISKAKGQPREPQVYTLPPSRDELTKNQVSLSCAVKGFYPSDIAVLWESYGTEWASYKTTPPVLDSDGSFFLVSKLTVTKEEWQQGFVFSCSVMHEALHNHYTQKSLSLSPGK

SEQ ID NO: 167 - protein, 220 aa, Artificial Sequence
  Synthetic construct
PCPAPEAAGGPSVFLFPPKPKDTLYITREPEVTCVVVDVSHEDPEVKFNWYVDGVEVHNAKTKPREEQYNSTYRVVSVLTVLHQDWLNGKEYKCKVSNKALPAPIEKTISKAKGQPREPQVYTLPPSRDELTKNQVSLSCAVKGFYPSDIAVLWESYGTEWASYKTTPPVLDSDGSFFLVSKLTVTKEEWQQGFVFSCSVMHEALHNHYTQKSLSLSPGK

SEQ ID NO: 168 - protein, 220 aa, Artificial Sequence
  Synthetic construct
PCPAPEAAGGPSVFLFPPKPKDTLYITREPEVTCVVVDVSHEDPEVKFNWYVDGVEVHNAKTKPREEQYNSTYRVVSVLTVLHQDWLNGKEYKCKVSNKALGAPIEKTISKAKGQPREPQVYTLPPSRDELTKNQVSLSCAVKGFYPSDIAVLWESYGTEWASYKTTPPVLDSDGSFFLVSKLTVTKEEWQQGFVFSCSVMHEALHNHYTQKSLSLSPGK

SEQ ID NO: 169 - protein, 220 aa, Artificial Sequence
  Synthetic construct
PCPAPELLGGPSVFLFPPKPKDTLMISRTPEVTCVVVDVSHEDPEVKFNWYVDGVEVHNAKTKPREEQYNSTYRVVSVLTVLHQDWLNGKEYKCKVSNKALPAPIEKTISKAKGQPREPQVYTLPPSRDELTKNQVSLWCLVKGFYPSDIAVEWESYGTEWSNYKTTPPVLDSDGSFFLYSKLTVTKEEWQQGFVFSCSVMHEALHNHYTQKSLSLSPGK

SEQ ID NO: 170 - protein, 220 aa, Artificial Sequence
  Synthetic construct
PCPAPEAAGGPSVFLFPPKPKDTLMISRTPEVTCVVVDVSHEDPEVKFNWYVDGVEVHNAKTKPREEQYNSTYRVVSVLTVLHQDWLNGKEYKCKVSNKALPAPIEKTISKAKGQPREPQVYTLPPSRDELTKNQVSLWCLVKGFYPSDIAVEWESYGTEWSNYKTTPPVLDSDGSFFLYSKLTVTKEEWQQGFVFSCSVMHEALHNHYTQKSLSLSPGK

SEQ ID NO: 171 - protein, 220 aa, Artificial Sequence
  Synthetic construct
PCPAPEAAGGPSVFLFPPKPKDTLMISRTPEVTCVVVDVSHEDPEVKFNWYVDGVEVHNAKTKPREEQYNSTYRVVSVLTVLHQDWLNGKEYKCKVSNKALGAPIEKTISKAKGQPREPQVYTLPPSRDELTKNQVSLWCLVKGFYPSDIAVEWESYGTEWSNYKTTPPVLDSDGSFFLYSKLTVTKEEWQQGFVFSCSVMHEALHNHYTQKSLSLSPGK

SEQ ID NO: 172 - protein, 220 aa, Artificial Sequence
  Synthetic construct
PCPAPELLGGPSVFLFPPKPKDTLYITREPEVTCVVVDVSHEDPEVKFNWYVDGVEVHNAKTKPREEQYNSTYRVVSVLTVLHQDWLNGKEYKCKVSNKALPAPIEKTISKAKGQPREPQVYTLPPSRDELTKNQVSLWCLVKGFYPSDIAVEWESYGTEWSNYKTTPPVLDSDGSFFLYSKLTVTKEEWQQGFVFSCSVMHEALHNHYTQKSLSLSPGK

SEQ ID NO: 173 - protein, 220 aa, Artificial Sequence
  Synthetic construct
PCPAPEAAGGPSVFLFPPKPKDTLYITREPEVTCVVVDVSHEDPEVKFNWYVDGVEVHNAKTKPREEQYNSTYRVVSVLTVLHQDWLNGKEYKCKVSNKALPAPIEKTISKAKGQPREPQVYTLPPSRDELTKNQVSLWCLVKGFYPSDIAVEWESYGTEWSNYKTTPPVLDSDGSFFLYSKLTVTKEEWQQGFVFSCSVMHEALHNHYTQKSLSLSPGK

SEQ ID NO: 174 - protein, 220 aa, Artificial Sequence
  Synthetic construct
PCPAPEAAGGPSVFLFPPKPKDTLYITREPEVTCVVVDVSHEDPEVKFNWYVDGVEVHNAKTKPREEQYNSTYRVVSVLTVLHQDWLNGKEYKCKVSNKALGAPIEKTISKAKGQPREPQVYTLPPSRDELTKNQVSLWCLVKGFYPSDIAVEWESYGTEWSNYKTTPPVLDSDGSFFLYSKLTVTKEEWQQGFVFSCSVMHEALHNHYTQKSLSLSPGK

SEQ ID NO: 175 - protein, 220 aa, Artificial Sequence
  Synthetic construct
PCPAPELLGGPSVFLFPPKPKDTLMISRTPEVTCVVVDVSHEDPEVKFNWYVDGVEVHNAKTKPREEQYNSTYRVVSVLTVLHQDWLNGKEYKCKVSNKALPAPIEKTISKAKGQPREPQVYTLPPSRDELTKNQVSLSCAVKGFYPSDIAVEWESYGTEWSNYKTTPPVLDSDGSFFLVSKLTVTKEEWQQGFVFSCSVMHEALHNHYTQKSLSLSPGK

SEQ ID NO: 176 - protein, 220 aa, Artificial Sequence
  Synthetic construct
PCPAPEAAGGPSVFLFPPKPKDTLMISRTPEVTCVVVDVSHEDPEVKFNWYVDGVEVHNAKTKPREEQYNSTYRVVSVLTVLHQDWLNGKEYKCKVSNKALPAPIEKTISKAKGQPREPQVYTLPPSRDELTKNQVSLSCAVKGFYPSDIAVEWESYGTEWSNYKTTPPVLDSDGSFFLVSKLTVTKEEWQQGFVFSCSVMHEALHNHYTQKSLSLSPGK

SEQ ID NO: 177 - protein, 220 aa, Artificial Sequence
  Synthetic construct
PCPAPEAAGGPSVFLFPPKPKDTLMISRTPEVTCVVVDVSHEDPEVKFNWYVDGVEVHNAKTKPREEQYNSTYRVVSVLTVLHQDWLNGKEYKCKVSNKALGAPIEKTISKAKGQPREPQVYTLPPSRDELTKNQVSLSCAVKGFYPSDIAVEWESYGTEWSNYKTTPPVLDSDGSFFLVSKLTVTKEEWQQGFVFSCSVMHEALHNHYTQKSLSLSPGK

SEQ ID NO: 178 - protein, 220 aa, Artificial Sequence
  Synthetic construct
PCPAPELLGGPSVFLFPPKPKDTLYITREPEVTCVVVDVSHEDPEVKFNWYVDGVEVHNAKTKPREEQYNSTYRVVSVLTVLHQDWLNGKEYKCKVSNKALPAPIEKTISKAKGQPREPQVYTLPPSRDELTKNQVSLSCAVKGFYPSDIAVEWESYGTEWSNYKTTPPVLDSDGSFFLVSKLTVTKEEWQQGFVFSCSVMHEALHNHYTQKSLSLSPGK

SEQ ID NO: 179 - protein, 220 aa, Artificial Sequence
  Synthetic construct
PCPAPEAAGGPSVFLFPPKPKDTLYITREPEVTCVVVDVSHEDPEVKFNWYVDGVEVHNAKTKPREEQYNSTYRVVSVLTVLHQDWLNGKEYKCKVSNKALPAPIEKTISKAKGQPREPQVYTLPPSRDELTKNQVSLSCAVKGFYPSDIAVEWESYGTEWSNYKTTPPVLDSDGSFFLVSKLTVTKEEWQQGFVFSCSVMHEALHNHYTQKSLSLSPGK

SEQ ID NO: 180 - protein, 220 aa, Artificial Sequence
  Synthetic construct
PCPAPEAAGGPSVFLFPPKPKDTLYITREPEVTCVVVDVSHEDPEVKFNWYVDGVEVHNAKTKPREEQYNSTYRVVSVLTVLHQDWLNGKEYKCKVSNKALGAPIEKTISKAKGQPREPQVYTLPPSRDELTKNQVSLSCAVKGFYPSDIAVEWESYGTEWSNYKTTPPVLDSDGSFFLVSKLTVTKEEWQQGFVFSCSVMHEALHNHYTQKSLSLSPGK

SEQ ID NO: 181 - protein, 247 aa, Artificial Sequence
  Synthetic construct
METDTLLLWVLLLWVPGSTGDKTHTCPPCPAPEAAGGPSVFLFPPKPKDTLYITREPEVTCVVVDVSHEDPEVKFNWYVDGVEVHNAKTKPREEQYNSTYRVVSVLTVLHQDWLNGKEYKCKVSNKALGAPIEKTISKAKGQPREPQVYTLPPSRDELTKNQVSLTCLVKGFYPSDIAVEWESYGTEWSSYKTTPPVLDSDGSFFLYSKLTVTKSEWQQGFVFSCSVMHEALHNHYTQKSLSLSPGK

SEQ ID NO: 182 - protein, 220 aa, Artificial Sequence
  Synthetic construct
PCPAPELLGGPSVFLFPPKPKDTLMISRTPEVTCVVVDVSHEDPEVKFNWYVDGVEVHNAKTKPREEQYNSTYRVVSVLTVLHQDWLNGKEYKCKVSNKALPAPIEKTISKAKGQPREPQVYTLPPSRDELTKNQVSLTCLVKGFYPSDIAVEWESWGFVWSTYKTTPPVLDSDGSFFLYSKLTVPKSNWQQGFVFSCSVMHEALHNHYTQKSLSLSPGK

SEQ ID NO: 183 - protein, 220 aa, Artificial Sequence
  Synthetic construct
PCPAPELLGGPSVFLFPPKPKDTLMISRTPEVTCVVVDVSHEDPEVKFNWYVDGVEVHNAKTKPREEQYNSTYRVVSVLTVLHQDWLNGKEYKCKVSNKALPAPIEKTISKAKGQPREPQVYTLPPSRDELTKNQVSLTCLVKGFYPSDIAVEWESWGHVWSTYKTTPPVLDSDGSFFLYSKLTVPKSNWQQGYVFSCSVMHEALHNHYTQKSLSLSPGK

SEQ ID NO: 184 - protein, 220 aa, Artificial Sequence
  Synthetic construct
PCPAPELLGGPSVFLFPPKPKDTLMISRTPEVTCVVVDVSHEDPEVKFNWYVDGVEVHNAKTKPREEQYNSTYRVVSVLTVLHQDWLNGKEYKCKVSNKALPAPIEKTISKAKGQPREPQVYTLPPSRDELTKNQVSLTCLVKGFYPSDIAVEWESLGHVWVEQKTTPPVLDSDGSFFLYSKLTVPKSTWQQGWVFSCSVMHEALHNHYTQKSLSLSPGK

SEQ ID NO: 185 - protein, 220 aa, Artificial Sequence
  Synthetic construct
PCPAPELLGGPSVFLFPPKPKDTLMISRTPEVTCVVVDVSHEDPEVKFNWYVDGVEVHNAKTKPREEQYNSTYRVVSVLTVLHQDWLNGKEYKCKVSNKALPAPIEKTISKAKGQPREPQVYTLPPSRDELTKNQVSLTCLVKGFYPSDIAVEWESLGHVWVGVKTTPPVLDSDGSFFLYSKLTVPKSTWQQGWVFSCSVMHEALHNHYTQKSLSLSPGK

SEQ ID NO: 186 - protein, 220 aa, Artificial Sequence
  Synthetic construct
PCPAPELLGGPSVFLFPPKPKDTLMISRTPEVTCVVVDVSHEDPEVKFNWYVDGVEVHNAKTKPREEQYNSTYRVVSVLTVLHQDWLNGKEYKCKVSNKALPAPIEKTISKAKGQPREPQVYTLPPSRDELTKNQVSLTCLVKGFYPSDIAVEWESLGHVWVHTKTTPPVLDSDGSFFLYSKLTVPKSTWQQGWVFSCSVMHEALHNHYTQKSLSLSPGK

SEQ ID NO: 187 - protein, 220 aa, Artificial Sequence
  Synthetic construct
PCPAPELLGGPSVFLFPPKPKDTLMISRTPEVTCVVVDVSHEDPEVKFNWYVDGVEVHNAKTKPREEQYNSTYRVVSVLTVLHQDWLNGKEYKCKVSNKALPAPIEKTISKAKGQPREPQVYTLPPSRDELTKNQVSLTCLVKGFYPSDIAVEWESWGTVWGTYKTTPPVLDSDGSFFLYSKLTVPKSNWQQGYVFSCSVMHEALHNHYTQKSLSLSPGK

SEQ ID NO: 188 - protein, 220 aa, Artificial Sequence
  Synthetic construct
PCPAPELLGGPSVFLFPPKPKDTLMISRTPEVTCVVVDVSHEDPEVKFNWYVDGVEVHNAKTKPREEQYNSTYRVVSVLTVLHQDWLNGKEYKCKVSNKALPAPIEKTISKAKGQPREPQVYTLPPSRDELTKNQVSLTCLVKGFYPSDIAVEWESLGHVWVGTKTTPPVLDSDGSFFLYSKLTVPKSTWQQGWVFSCSVMHEALHNHYTQKSLSLSPGK

SEQ ID NO: 189 - protein, 220 aa, Artificial Sequence
  Synthetic construct
PCPAPELLGGPSVFLFPPKPKDTLMISRTPEVTCVVVDVSHEDPEVKFNWYVDGVEVHNAKTKPREEQYNSTYRVVSVLTVLHQDWLNGKEYKCKVSNKALPAPIEKTISKAKGQPREPQVYTLPPSRDELTKNQVSLTCLVKGFYPSDIAVEWESFGTEWSSYKTTPPVLDSDGSFFLYSKLTVSKEEWQQGFVFSCSVMHEALHNHYTQKSLSLSPGK

SEQ ID NO: 190 - protein, 220 aa, Artificial Sequence
  Synthetic construct
PCPAPELLGGPSVFLFPPKPKDTLMISRTPEVTCVVVDVSHEDPEVKFNWYVDGVEVHNAKTKPREEQYNSTYRVVSVLTVLHQDWLNGKEYKCKVSNKALPAPIEKTISKAKGQPREPQVYTLPPSRDELTKNQVSLTCLVKGFYPSDIAVEWESYGTEWANYKTTPPVLDSDGSFFLYSKLTVSKSEWQQGFVFSCSVMHEALHNHYTQKSLSLSPGK

SEQ ID NO: 191 - protein, 220 aa, Artificial Sequence
  Synthetic construct
PCPAPELLGGPSVFLFPPKPKDTLMISRTPEVTCVVVDVSHEDPEVKFNWYVDGVEVHNAKTKPREEQYNSTYRVVSVLTVLHQDWLNGKEYKCKVSNKALPAPIEKTISKAKGQPREPQVYTLPPSRDELTKNQVSLTCLVKGFYPSDIAVEWESFGTEWSNYKTTPPVLDSDGSFFLYSKLTVSKEEWQQGFVFSCSVMHEALHNHYTQKSLSLSPGK

SEQ ID NO: 192 - protein, 220 aa, Artificial Sequence
  Synthetic construct
PCPAPELLGGPSVFLFPPKPKDTLMISRTPEVTCVVVDVSHEDPEVKFNWYVDGVEVHNAKTKPREEQYNSTYRVVSVLTVLHQDWLNGKEYKCKVSNKALPAPIEKTISKAKGQPREPQVYTLPPSRDELTKNQVSLTCLVKGFYPSDIAVEWESYGTEWSSYKTTPPVLDSDGSFFLYSKLTVSKSEWQQGFVFSCSVMHEALHNHYTQKSLSLSPGK

SEQ ID NO: 193 - protein, 220 aa, Artificial Sequence
  Synthetic construct
PCPAPELLGGPSVFLFPPKPKDTLMISRTPEVTCVVVDVSHEDPEVKFNWYVDGVEVHNAKTKPREEQYNSTYRVVSVLTVLHQDWLNGKEYKCKVSNKALPAPIEKTISKAKGQPREPQVYTLPPSRDELTKNQVSLTCLVKGFYPSDIAVEWESYGTEWVNYKTTPPVLDSDGSFFLYSKLTVSKEEWQQGFVFSCSVMHEALHNHYTQKSLSLSPGK

SEQ ID NO: 194 - protein, 220 aa, Artificial Sequence; identical to SEQ ID NO: 14
  Synthetic construct

SEQ ID NO: 195 - protein, 220 aa, Artificial Sequence
  Synthetic construct
PCPAPELLGGPSVFLFPPKPKDTLMISRTPEVTCVVVDVSHEDPEVKFNWYVDGVEVHNAKTKPREEQYNSTYRVVSVLTVLHQDWLNGKEYKCKVSNKALPAPIEKTISKAKGQPREPQVYTLPPSRDELTKNQVSLTCLVKGFYPSDIAVEWESFGTEWVNYKTTPPVLDSDGSFFLYSKLTVSKEEWQQGFVFSCSVMHEALHNHYTQKSLSLSPGK

SEQ ID NO: 196 - protein, 220 aa, Artificial Sequence
  Synthetic construct
PCPAPELLGGPSVFLFPPKPKDTLMISRTPEVTCVVVDVSHEDPEVKFNWYVDGVEVHNAKTKPREEQYNSTYRVVSVLTVLHQDWLNGKEYKCKVSNKALPAPIEKTISKAKGQPREPQVYTLPPSRDELTKNQVSLWCLVKGFYPSDIAVWWESYGTEWSSYKTTPPVLDSDGSFFLYSKLTVTKEEWQQGFVFSCSVMHEALHNHYTQKSLSLSPGK

SEQ ID NO: 197 - protein, 220 aa, Artificial Sequence
  Synthetic construct
PCPAPEAAGGPSVFLFPPKPKDTLMISRTPEVTCVVVDVSHEDPEVKFNWYVDGVEVHNAKTKPREEQYNSTYRVVSVLTVLHQDWLNGKEYKCKVSNKALPAPIEKTISKAKGQPREPQVYTLPPSRDELTKNQVSLWCLVKGFYPSDIAVWWESYGTEWSSYKTTPPVLDSDGSFFLYSKLTVTKEEWQQGFVFSCSVMHEALHNHYTQKSLSLSPGK

SEQ ID NO: 198 - protein, 220 aa, Artificial Sequence
  Synthetic construct
PCPAPEAAGGPSVFLFPPKPKDTLMISRTPEVTCVVVDVSHEDPEVKFNWYVDGVEVHNAKTKPREEQYNSTYRVVSVLTVLHQDWLNGKEYKCKVSNKALGAPIEKTISKAKGQPREPQVYTLPPSRDELTKNQVSLWCLVKGFYPSDIAVWWESYGTEWSSYKTTPPVLDSDGSFFLYSKLTVTKEEWQQGFVFSCSVMHEALHNHYTQKSLSLSPGK

SEQ ID NO: 199 - protein, 220 aa, Artificial Sequence
  Synthetic construct
PCPAPELLGGPSVFLFPPKPKDTLYITREPEVTCVVVDVSHEDPEVKFNWYVDGVEVHNAKTKPREEQYNSTYRVVSVLTVLHQDWLNGKEYKCKVSNKALPAPIEKTISKAKGQPREPQVYTLPPSRDELTKNQVSLWCLVKGFYPSDIAVWWESYGTEWSSYKTTPPVLDSDGSFFLYSKLTVTKEEWQQGFVFSCSVMHEALHNHYTQKSLSLSPGK

SEQ ID NO: 200 - protein, 220 aa, Artificial Sequence
  Synthetic construct
PCPAPEAAGGPSVFLFPPKPKDTLYITREPEVTCVVVDVSHEDPEVKFNWYVDGVEVHNAKTKPREEQYNSTYRVVSVLTVLHQDWLNGKEYKCKVSNKALPAPIEKTISKAKGQPREPQVYTLPPSRDELTKNQVSLWCLVKGFYPSDIAVWWESYGTEWSSYKTTPPVLDSDGSFFLYSKLTVTKEEWQQGFVFSCSVMHEALHNHYTQKSLSLSPGK

SEQ ID NO: 201 - protein, 220 aa, Artificial Sequence
  Synthetic construct
PCPAPEAAGGPSVFLFPPKPKDTLYITREPEVTCVVVDVSHEDPEVKFNWYVDGVEVHNAKTKPREEQYNSTYRVVSVLTVLHQDWLNGKEYKCKVSNKALGAPIEKTISKAKGQPREPQVYTLPPSRDELTKNQVSLWCLVKGFYPSDIAVWWESYGTEWSSYKTTPPVLDSDGSFFLYSKLTVTKEEWQQGFVFSCSVMHEALHNHYTQKSLSLSPGK

SEQ ID NO: 202 - protein, 220 aa, Artificial Sequence
  Synthetic construct
PCPAPELLGGPSVFLFPPKPKDTLMISRTPEVTCVVVDVSHEDPEVKFNWYVDGVEVHNAKTKPREEQYNSTYRVVSVLTVLHQDWLNGKEYKCKVSNKALPAPIEKTISKAKGQPREPQVYTLPPSRDELTKNQVSLSCAVKGFYPSDIAVWWESYGTEWSSYKTTPPVLDSDGSFFLVSKLTVTKEEWQQGFVFSCSVMHEALHNHYTQKSLSLSPGK

SEQ ID NO: 203 - protein, 220 aa, Artificial Sequence
  Synthetic construct
PCPAPEAAGGPSVFLFPPKPKDTLMISRTPEVTCVVVDVSHEDPEVKFNWYVDGVEVHNAKTKPREEQYNSTYRVVSVLTVLHQDWLNGKEYKCKVSNKALPAPIEKTISKAKGQPREPQVYTLPPSRDELTKNQVSLSCAVKGFYPSDIAVWWESYGTEWSSYKTTPPVLDSDGSFFLVSKLTVTKEEWQQGFVFSCSVMHEALHNHYTQKSLSLSPGK

SEQ ID NO: 204 - protein, 220 aa, Artificial Sequence
  Synthetic construct
PCPAPEAAGGPSVFLFPPKPKDTLMISRTPEVTCVVVDVSHEDPEVKFNWYVDGVEVHNAKTKPREEQYNSTYRVVSVLTVLHQDWLNGKEYKCKVSNKALGAPIEKTISKAKGQPREPQVYTLPPSRDELTKNQVSLSCAVKGFYPSDIAVWWESYGTEWSSYKTTPPVLDSDGSFFLVSKLTVTKEEWQQGFVFSCSVMHEALHNHYTQKSLSLSPGK

SEQ ID NO: 205 - protein, 220 aa, Artificial Sequence
  Synthetic construct
PCPAPELLGGPSVFLFPPKPKDTLYITREPEVTCVVVDVSHEDPEVKFNWYVDGVEVHNAKTKPREEQYNSTYRVVSVLTVLHQDWLNGKEYKCKVSNKALPAPIEKTISKAKGQPREPQVYTLPPSRDELTKNQVSLSCAVKGFYPSDIAVWWESYGTEWSSYKTTPPVLDSDGSFFLVSKLTVTKEEWQQGFVFSCSVMHEALHNHYTQKSLSLSPGK

SEQ ID NO: 206 - protein, 220 aa, Artificial Sequence
  Synthetic construct
PCPAPEAAGGPSVFLFPPKPKDTLYITREPEVTCVVVDVSHEDPEVKFNWYVDGVEVHNAKTKPREEQYNSTYRVVSVLTVLHQDWLNGKEYKCKVSNKALPAPIEKTISKAKGQPREPQVYTLPPSRDELTKNQVSLSCAVKGFYPSDIAVWWESYGTEWSSYKTTPPVLDSDGSFFLVSKLTVTKEEWQQGFVFSCSVMHEALHNHYTQKSLSLSPGK

SEQ ID NO: 207 - protein, 220 aa, Artificial Sequence
  Synthetic construct
PCPAPEAAGGPSVFLFPPKPKDTLYITREPEVTCVVVDVSHEDPEVKFNWYVDGVEVHNAKTKPREEQYNSTYRVVSVLTVLHQDWLNGKEYKCKVSNKALGAPIEKTISKAKGQPREPQVYTLPPSRDELTKNQVSLSCAVKGFYPSDIAVWWESYGTEWSSYKTTPPVLDSDGSFFLVSKLTVTKEEWQQGFVFSCSVMHEALHNHYTQKSLSLSPGK

SEQ ID NO: 208 - protein, 220 aa, Artificial Sequence
  Synthetic construct
PCPAPELLGGPSVFLFPPKPKDTLMISRTPEVTCVVVDVSHEDPEVKFNWYVDGVEVHNAKTKPREEQYNSTYRVVSVLTVLHQDWLNGKEYKCKVSNKALPAPIEKTISKAKGQPREPQVYTLPPSRDELTKNQVSLWCLVKGFYPSDIAVEWESFGTEWSSYKTTPPVLDSDGSFFLYSKLTVSKEEWQQGFVFSCSVMHEALHNHYTQKSLSLSPGK

SEQ ID NO: 209 - protein, 220 aa, Artificial Sequence
  Synthetic construct
PCPAPEAAGGPSVFLFPPKPKDTLMISRTPEVTCVVVDVSHEDPEVKFNWYVDGVEVHNAKTKPREEQYNSTYRVVSVLTVLHQDWLNGKEYKCKVSNKALPAPIEKTISKAKGQPREPQVYTLPPSRDELTKNQVSLWCLVKGFYPSDIAVEWESFGTEWSSYKTTPPVLDSDGSFFLYSKLTVSKEEWQQGFVFSCSVMHEALHNHYTQKSLSLSPGK

SEQ ID NO: 210 - protein, 220 aa, Artificial Sequence
  Synthetic construct
PCPAPEAAGGPSVFLFPPKPKDTLMISRTPEVTCVVVDVSHEDPEVKFNWYVDGVEVHNAKTKPREEQYNSTYRVVSVLTVLHQDWLNGKEYKCKVSNKALGAPIEKTISKAKGQPREPQVYTLPPSRDELTKNQVSLWCLVKGFYPSDIAVEWESFGTEWSSYKTTPPVLDSDGSFFLYSKLTVSKEEWQQGFVFSCSVMHEALHNHYTQKSLSLSPGK

SEQ ID NO: 211 - protein, 220 aa, Artificial Sequence
  Synthetic construct
PCPAPELLGGPSVFLFPPKPKDTLYITREPEVTCVVVDVSHEDPEVKFNWYVDGVEVHNAKTKPREEQYNSTYRVVSVLTVLHQDWLNGKEYKCKVSNKALPAPIEKTISKAKGQPREPQVYTLPPSRDELTKNQVSLWCLVKGFYPSDIAVEWESFGTEWSSYKTTPPVLDSDGSFFLYSKLTVSKEEWQQGFVFSCSVMHEALHNHYTQKSLSLSPGK

SEQ ID NO: 212 - protein, 220 aa, Artificial Sequence
  Synthetic construct
PCPAPEAAGGPSVFLFPPKPKDTLYITREPEVTCVVVDVSHEDPEVKFNWYVDGVEVHNAKTKPREEQYNSTYRVVSVLTVLHQDWLNGKEYKCKVSNKALPAPIEKTISKAKGQPREPQVYTLPPSRDELTKNQVSLWCLVKGFYPSDIAVEWESFGTEWSSYKTTPPVLDSDGSFFLYSKLTVSKEEWQQGFVFSCSVMHEALHNHYTQKSLSLSPGK

SEQ ID NO: 213 - protein, 220 aa, Artificial Sequence
  Synthetic construct
PCPAPEAAGGPSVFLFPPKPKDTLYITREPEVTCVVVDVSHEDPEVKFNWYVDGVEVHNAKTKPREEQYNSTYRVVSVLTVLHQDWLNGKEYKCKVSNKALGAPIEKTISKAKGQPREPQVYTLPPSRDELTKNQVSLWCLVKGFYPSDIAVEWESFGTEWSSYKTTPPVLDSDGSFFLYSKLTVSKEEWQQGFVFSCSVMHEALHNHYTQKSLSLSPGK

SEQ ID NO: 214 - protein, 220 aa, Artificial Sequence
  Synthetic construct
PCPAPELLGGPSVFLFPPKPKDTLMISRTPEVTCVVVDVSHEDPEVKFNWYVDGVEVHNAKTKPREEQYNSTYRVVSVLTVLHQDWLNGKEYKCKVSNKALPAPIEKTISKAKGQPREPQVYTLPPSRDELTKNQVSLSCAVKGFYPSDIAVEWESFGTEWSSYKTTPPVLDSDGSFFLVSKLTVSKEEWQQGFVFSCSVMHEALHNHYTQKSLSLSPGK

SEQ ID NO: 215 - protein, 220 aa, Artificial Sequence
  Synthetic construct
PCPAPEAAGGPSVFLFPPKPKDTLMISRTPEVTCVVVDVSHEDPEVKFNWYVDGVEVHNAKTKPREEQYNSTYRVVSVLTVLHQDWLNGKEYKCKVSNKALPAPIEKTISKAKGQPREPQVYTLPPSRDELTKNQVSLSCAVKGFYPSDIAVEWESFGTEWSSYKTTPPVLDSDGSFFLVSKLTVSKEEWQQGFVFSCSVMHEALHNHYTQKSLSLSPGK

SEQ ID NO: 216 - protein, 220 aa, Artificial Sequence
  Synthetic construct
PCPAPEAAGGPSVFLFPPKPKDTLMISRTPEVTCVVVDVSHEDPEVKFNWYVDGVEVHNAKTKPREEQYNSTYRVVSVLTVLHQDWLNGKEYKCKVSNKALGAPIEKTISKAKGQPREPQVYTLPPSRDELTKNQVSLSCAVKGFYPSDIAVEWESFGTEWSSYKTTPPVLDSDGSFFLVSKLTVSKEEWQQGFVFSCSVMHEALHNHYTQKSLSLSPGK

SEQ ID NO: 217 - protein, 220 aa, Artificial Sequence
  Synthetic construct
PCPAPELLGGPSVFLFPPKPKDTLYITREPEVTCVVVDVSHEDPEVKFNWYVDGVEVHNAKTKPREEQYNSTYRVVSVLTVLHQDWLNGKEYKCKVSNKALPAPIEKTISKAKGQPREPQVYTLPPSRDELTKNQVSLSCAVKGFYPSDIAVEWESFGTEWSSYKTTPPVLDSDGSFFLVSKLTVSKEEWQQGFVFSCSVMHEALHNHYTQKSLSLSPGK

SEQ ID NO: 218 - protein, 220 aa, Artificial Sequence
  Synthetic construct
PCPAPEAAGGPSVFLFPPKPKDTLYITREPEVTCVVVDVSHEDPEVKFNWYVDGVEVHNAKTKPREEQYNSTYRVVSVLTVLHQDWLNGKEYKCKVSNKALPAPIEKTISKAKGQPREPQVYTLPPSRDELTKNQVSLSCAVKGFYPSDIAVEWESFGTEWSSYKTTPPVLDSDGSFFLVSKLTVSKEEWQQGFVFSCSVMHEALHNHYTQKSLSLSPGK

SEQ ID NO: 219 - protein, 220 aa, Artificial Sequence
  Synthetic construct
PCPAPEAAGGPSVFLFPPKPKDTLYITREPEVTCVVVDVSHEDPEVKFNWYVDGVEVHNAKTKPREEQYNSTYRVVSVLTVLHQDWLNGKEYKCKVSNKALGAPIEKTISKAKGQPREPQVYTLPPSRDELTKNQVSLSCAVKGFYPSDIAVEWESFGTEWSSYKTTPPVLDSDGSFFLVSKLTVSKEEWQQGFVFSCSVMHEALHNHYTQKSLSLSPGK

SEQ ID NO: 220 - protein, 220 aa, Artificial Sequence
  Synthetic construct
PCPAPELLGGPSVFLFPPKPKDTLMISRTPEVTCVVVDVSHEDPEVKFNWYVDGVEVHNAKTKPREEQYNSTYRVVSVLTVLHQDWLNGKEYKCKVSNKALPAPIEKTISKAKGQPREPQVYTLPPSRDELTKNQVSLWCLVKGFYPSDIAVEWESYGTEWANYKTTPPVLDSDGSFFLYSKLTVSKSEWQQGFVFSCSVMHEALHNHYTQKSLSLSPGK

SEQ ID NO: 221 - protein, 220 aa, Artificial Sequence
  Synthetic construct
PCPAPEAAGGPSVFLFPPKPKDTLMISRTPEVTCVVVDVSHEDPEVKFNWYVDGVEVHNAKTKPREEQYNSTYRVVSVLTVLHQDWLNGKEYKCKVSNKALPAPIEKTISKAKGQPREPQVYTLPPSRDELTKNQVSLWCLVKGFYPSDIAVEWESYGTEWANYKTTPPVLDSDGSFFLYSKLTVSKSEWQQGFVFSCSVMHEALHNHYTQKSLSLSPGK

SEQ ID NO: 222 - protein, 220 aa, Artificial Sequence
  Synthetic construct
PCPAPEAAGGPSVFLFPPKPKDTLMISRTPEVTCVVVDVSHEDPEVKFNWYVDGVEVHNAKTKPREEQYNSTYRVVSVLTVLHQDWLNGKEYKCKVSNKALGAPIEKTISKAKGQPREPQVYTLPPSRDELTKNQVSLWCLVKGFYPSDIAVEWESYGTEWANYKTTPPVLDSDGSFFLYSKLTVSKSEWQQGFVFSCSVMHEALHNHYTQKSLSLSPGK

SEQ ID NO: 223 - protein, 220 aa, Artificial Sequence
  Synthetic construct
PCPAPELLGGPSVFLFPPKPKDTLYITREPEVTCVVVDVSHEDPEVKFNWYVDGVEVHNAKTKPREEQYNSTYRVVSVLTVLHQDWLNGKEYKCKVSNKALPAPIEKTISKAKGQPREPQVYTLPPSRDELTKNQVSLWCLVKGFYPSDIAVEWESYGTEWANYKTTPPVLDSDGSFFLYSKLTVSKSEWQQGFVFSCSVMHEALHNHYTQKSLSLSPGK

SEQ ID NO: 224 - protein, 220 aa, Artificial Sequence
  Synthetic construct
PCPAPEAAGGPSVFLFPPKPKDTLYITREPEVTCVVVDVSHEDPEVKFNWYVDGVEVHNAKTKPREEQYNSTYRVVSVLTVLHQDWLNGKEYKCKVSNKALPAPIEKTISKAKGQPREPQVYTLPPSRDELTKNQVSLWCLVKGFYPSDIAVEWESYGTEWANYKTTPPVLDSDGSFFLYSKLTVSKSEWQQGFVFSCSVMHEALHNHYTQKSLSLSPGK

SEQ ID NO: 225 - protein, 220 aa, Artificial Sequence
  Synthetic construct
PCPAPEAAGGPSVFLFPPKPKDTLYITREPEVTCVVVDVSHEDPEVKFNWYVDGVEVHNAKTKPREEQYNSTYRVVSVLTVLHQDWLNGKEYKCKVSNKALGAPIEKTISKAKGQPREPQVYTLPPSRDELTKNQVSLWCLVKGFYPSDIAVEWESYGTEWANYKTTPPVLDSDGSFFLYSKLTVSKSEWQQGFVFSCSVMHEALHNHYTQKSLSLSPGK

SEQ ID NO: 226 - protein, 220 aa, Artificial Sequence
  Synthetic construct
PCPAPELLGGPSVFLFPPKPKDTLMISRTPEVTCVVVDVSHEDPEVKFNWYVDGVEVHNAKTKPREEQYNSTYRVVSVLTVLHQDWLNGKEYKCKVSNKALPAPIEKTISKAKGQPREPQVYTLPPSRDELTKNQVSLSCAVKGFYPSDIAVEWESYGTEWANYKTTPPVLDSDGSFFLVSKLTVSKSEWQQGFVFSCSVMHEALHNHYTQKSLSLSPGK

SEQ ID NO: 227 - protein, 220 aa, Artificial Sequence
  Synthetic construct
PCPAPEAAGGPSVFLFPPKPKDTLMISRTPEVTCVVVDVSHEDPEVKFNWYVDGVEVHNAKTKPREEQYNSTYRVVSVLTVLHQDWLNGKEYKCKVSNKALPAPIEKTISKAKGQPREPQVYTLPPSRDELTKNQVSLSCAVKGFYPSDIAVEWESYGTEWANYKTTPPVLDSDGSFFLVSKLTVSKSEWQQGFVFSCSVMHEALHNHYTQKSLSLSPGK

SEQ ID NO: 228 - protein, 220 aa, Artificial Sequence
  Synthetic construct
PCPAPEAAGGPSVFLFPPKPKDTLMISRTPEVTCVVVDVSHEDPEVKFNWYVDGVEVHNAKTKPREEQYNSTYRVVSVLTVLHQDWLNGKEYKCKVSNKALGAPIEKTISKAKGQPREPQVYTLPPSRDELTKNQVSLSCAVKGFYPSDIAVEWESYGTEWANYKTTPPVLDSDGSFFLVSKLTVSKSEWQQGFVFSCSVMHEALHNHYTQKSLSLSPGK

SEQ ID NO: 229 - protein, 220 aa, Artificial Sequence
  Synthetic construct
PCPAPELLGGPSVFLFPPKPKDTLYITREPEVTCVVVDVSHEDPEVKFNWYVDGVEVHNAKTKPREEQYNSTYRVVSVLTVLHQDWLNGKEYKCKVSNKALPAPIEKTISKAKGQPREPQVYTLPPSRDELTKNQVSLSCAVKGFYPSDIAVEWESYGTEWANYKTTPPVLDSDGSFFLVSKLTVSKSEWQQGFVFSCSVMHEALHNHYTQKSLSLSPGK

SEQ ID NO: 230 - protein, 220 aa, Artificial Sequence
  Synthetic construct
PCPAPEAAGGPSVFLFPPKPKDTLYITREPEVTCVVVDVSHEDPEVKFNWYVDGVEVHNAKTKPREEQYNSTYRVVSVLTVLHQDWLNGKEYKCKVSNKALPAPIEKTISKAKGQPREPQVYTLPPSRDELTKNQVSLSCAVKGFYPSDIAVEWESYGTEWANYKTTPPVLDSDGSFFLVSKLTVSKSEWQQGFVFSCSVMHEALHNHYTQKSLSLSPGK

SEQ ID NO: 231 - protein, 220 aa, Artificial Sequence
  Synthetic construct
PCPAPEAAGGPSVFLFPPKPKDTLYITREPEVTCVVVDVSHEDPEVKFNWYVDGVEVHNAKTKPREEQYNSTYRVVSVLTVLHQDWLNGKEYKCKVSNKALGAPIEKTISKAKGQPREPQVYTLPPSRDELTKNQVSLSCAVKGFYPSDIAVEWESYGTEWANYKTTPPVLDSDGSFFLVSKLTVSKSEWQQGFVFSCSVMHEALHNHYTQKSLSLSPGK

SEQ ID NO: 232 - protein, 220 aa, Artificial Sequence
  Synthetic construct
PCPAPELLGGPSVFLFPPKPKDTLMISRTPEVTCVVVDVSHEDPEVKFNWYVDGVEVHNAKTKPREEQYNSTYRVVSVLTVLHQDWLNGKEYKCKVSNKALPAPIEKTISKAKGQPREPQVYTLPPSRDELTKNQVSLWCLVKGFYPSDIAVEWESFGTEWSNYKTTPPVLDSDGSFFLYSKLTVSKEEWQQGFVFSCSVMHEALHNHYTQKSLSLSPGK

SEQ ID NO: 233 - protein, 220 aa, Artificial Sequence
  Synthetic construct
PCPAPEAAGGPSVFLFPPKPKDTLMISRTPEVTCVVVDVSHEDPEVKFNWYVDGVEVHNAKTKPREEQYNSTYRVVSVLTVLHQDWLNGKEYKCKVSNKALPAPIEKTISKAKGQPREPQVYTLPPSRDELTKNQVSLWCLVKGFYPSDIAVEWESFGTEWSNYKTTPPVLDSDGSFFLYSKLTVSKEEWQQGFVFSCSVMHEALHNHYTQKSLSLSPGK

SEQ ID NO: 234 - protein, 220 aa, Artificial Sequence
  Synthetic construct
PCPAPEAAGGPSVFLFPPKPKDTLMISRTPEVTCVVVDVSHEDPEVKFNWYVDGVEVHNAKTKPREEQYNSTYRVVSVLTVLHQDWLNGKEYKCKVSNKALGAPIEKTISKAKGQPREPQVYTLPPSRDELTKNQVSLWCLVKGFYPSDIAVEWESFGTEWSNYKTTPPVLDSDGSFFLYSKLTVSKEEWQQGFVFSCSVMHEALHNHYTQKSLSLSPGK

SEQ ID NO: 235 - protein, 220 aa, Artificial Sequence
  Synthetic construct
PCPAPELLGGPSVFLFPPKPKDTLYITREPEVTCVVVDVSHEDPEVKFNWYVDGVEVHNAKTKPREEQYNSTYRVVSVLTVLHQDWLNGKEYKCKVSNKALPAPIEKTISKAKGQPREPQVYTLPPSRDELTKNQVSLWCLVKGFYPSDIAVEWESFGTEWSNYKTTPPVLDSDGSFFLYSKLTVSKEEWQQGFVFSCSVMHEALHNHYTQKSLSLSPGK

SEQ ID NO: 236 - protein, 220 aa, Artificial Sequence
  Synthetic construct
PCPAPEAAGGPSVFLFPPKPKDTLYITREPEVTCVVVDVSHEDPEVKFNWYVDGVEVHNAKTKPREEQYNSTYRVVSVLTVLHQDWLNGKEYKCKVSNKALPAPIEKTISKAKGQPREPQVYTLPPSRDELTKNQVSLWCLVKGFYPSDIAVEWESFGTEWSNYKTTPPVLDSDGSFFLYSKLTVSKEEWQQGFVFSCSVMHEALHNHYTQKSLSLSPGK

SEQ ID NO: 237 - protein, 220 aa, Artificial Sequence
  Synthetic construct
PCPAPEAAGGPSVFLFPPKPKDTLYITREPEVTCVVVDVSHEDPEVKFNWYVDGVEVHNAKTKPREEQYNSTYRVVSVLTVLHQDWLNGKEYKCKVSNKALGAPIEKTISKAKGQPREPQVYTLPPSRDELTKNQVSLWCLVKGFYPSDIAVEWESFGTEWSNYKTTPPVLDSDGSFFLYSKLTVSKEEWQQGFVFSCSVMHEALHNHYTQKSLSLSPGK

SEQ ID NO: 238 - protein, 220 aa, Artificial Sequence
  Synthetic construct
PCPAPELLGGPSVFLFPPKPKDTLMISRTPEVTCVVVDVSHEDPEVKFNWYVDGVEVHNAKTKPREEQYNSTYRVVSVLTVLHQDWLNGKEYKCKVSNKALPAPIEKTISKAKGQPREPQVYTLPPSRDELTKNQVSLSCAVKGFYPSDIAVEWESFGTEWSNYKTTPPVLDSDGSFFLVSKLTVSKEEWQQGFVFSCSVMHEALHNHYTQKSLSLSPGK

SEQ ID NO: 239 - protein, 220 aa, Artificial Sequence
  Synthetic construct
PCPAPEAAGGPSVFLFPPKPKDTLMISRTPEVTCVVVDVSHEDPEVKFNWYVDGVEVHNAKTKPREEQYNSTYRVVSVLTVLHQDWLNGKEYKCKVSNKALPAPIEKTISKAKGQPREPQVYTLPPSRDELTKNQVSLSCAVKGFYPSDIAVEWESFGTEWSNYKTTPPVLDSDGSFFLVSKLTVSKEEWQQGFVFSCSVMHEALHNHYTQKSLSLSPGK

SEQ ID NO: 240 - protein, 220 aa, Artificial Sequence
  Synthetic construct
PCPAPEAAGGPSVFLFPPKPKDTLMISRTPEVTCVVVDVSHEDPEVKFNWYVDGVEVHNAKTKPREEQYNSTYRVVSVLTVLHQDWLNGKEYKCKVSNKALGAPIEKTISKAKGQPREPQVYTLPPSRDELTKNQVSLSCAVKGFYPSDIAVEWESFGTEWSNYKTTPPVLDSDGSFFLVSKLTVSKEEWQQGFVFSCSVMHEALHNHYTQKSLSLSPGK

SEQ ID NO: 241 - protein, 220 aa, Artificial Sequence
  Synthetic construct
PCPAPELLGGPSVFLFPPKPKDTLYITREPEVTCVVVDVSHEDPEVKFNWYVDGVEVHNAKTKPREEQYNSTYRVVSVLTVLHQDWLNGKEYKCKVSNKALPAPIEKTISKAKGQPREPQVYTLPPSRDELTKNQVSLSCAVKGFYPSDIAVEWESFGTEWSNYKTTPPVLDSDGSFFLVSKLTVSKEEWQQGFVFSCSVMHEALHNHYTQKSLSLSPGK

SEQ ID NO: 242 - protein, 220 aa, Artificial Sequence
  Synthetic construct
PCPAPEAAGGPSVFLFPPKPKDTLYITREPEVTCVVVDVSHEDPEVKFNWYVDGVEVHNAKTKPREEQYNSTYRVVSVLTVLHQDWLNGKEYKCKVSNKALPAPIEKTISKAKGQPREPQVYTLPPSRDELTKNQVSLSCAVKGFYPSDIAVEWESFGTEWSNYKTTPPVLDSDGSFFLVSKLTVSKEEWQQGFVFSCSVMHEALHNHYTQKSLSLSPGK

SEQ ID NO: 243 - protein, 220 aa, Artificial Sequence
  Synthetic construct
PCPAPEAAGGPSVFLFPPKPKDTLYITREPEVTCVVVDVSHEDPEVKFNWYVDGVEVHNAKTKPREEQYNSTYRVVSVLTVLHQDWLNGKEYKCKVSNKALGAPIEKTISKAKGQPREPQVYTLPPSRDELTKNQVSLSCAVKGFYPSDIAVEWESFGTEWSNYKTTPPVLDSDGSFFLVSKLTVSKEEWQQGFVFSCSVMHEALHNHYTQKSLSLSPGK

SEQ ID NO: 244 - protein, 220 aa, Artificial Sequence
  Synthetic construct
PCPAPELLGGPSVFLFPPKPKDTLMISRTPEVTCVVVDVSHEDPEVKFNWYVDGVEVHNAKTKPREEQYNSTYRVVSVLTVLHQDWLNGKEYKCKVSNKALPAPIEKTISKAKGQPREPQVYTLPPSRDELTKNQVSLTCLVKGFYPSDIAVEWESFGTEWSSYKTTPPVLDSDGSFFLYSKLTVTKEEWQQGFVFSCSVLHEALHSHYTQKSLSLSPGK

SEQ ID NO: 245 - protein, 220 aa, Artificial Sequence
  Synthetic construct
PCPAPELLGGPSVFLFPPKPKDTLMISRTPEVTCVVVDVSHEDPEVKFNWYVDGVEVHNAKTKPREEQYNSTYRVVSVLTVLHQDWLNGKEYKCKVSNKALPAPIEKTISKAKGQPREPQVYTLPPSRDELTKNQVSLWCLVKGFYPSDIAVEWESFGTEWSSYKTTPPVLDSDGSFFLYSKLTVTKEEWQQGFVFSCSVLHEALHSHYTQKSLSLSPGK

SEQ ID NO: 246 - protein, 220 aa, Artificial Sequence
  Synthetic construct
PCPAPEAAGGPSVFLFPPKPKDTLMISRTPEVTCVVVDVSHEDPEVKFNWYVDGVEVHNAKTKPREEQYNSTYRVVSVLTVLHQDWLNGKEYKCKVSNKALPAPIEKTISKAKGQPREPQVYTLPPSRDELTKNQVSLWCLVKGFYPSDIAVEWESFGTEWSSYKTTPPVLDSDGSFFLYSKLTVTKEEWQQGFVFSCSVLHEALHSHYTQKSLSLSPGK

SEQ ID NO: 247 - protein, 220 aa, Artificial Sequence
  Synthetic construct
PCPAPEAAGGPSVFLFPPKPKDTLMISRTPEVTCVVVDVSHEDPEVKFNWYVDGVEVHNAKTKPREEQYNSTYRVVSVLTVLHQDWLNGKEYKCKVSNKALGAPIEKTISKAKGQPREPQVYTLPPSRDELTKNQVSLWCLVKGFYPSDIAVEWESFGTEWSSYKTTPPVLDSDGSFFLYSKLTVTKEEWQQGFVFSCSVLHEALHSHYTQKSLSLSPGK

SEQ ID NO: 248 - protein, 220 aa, Artificial Sequence
  Synthetic construct
PCPAPELLGGPSVFLFPPKPKDTLMISRTPEVTCVVVDVSHEDPEVKFNWYVDGVEVHNAKTKPREEQYNSTYRVVSVLTVLHQDWLNGKEYKCKVSNKALPAPIEKTISKAKGQPREPQVYTLPPSRDELTKNQVSLSCAVKGFYPSDIAVEWESFGTEWSSYKTTPPVLDSDGSFFLVSKLTVTKEEWQQGFVFSCSVLHEALHSHYTQKSLSLSPGK

SEQ ID NO: 249 - protein, 220 aa, Artificial Sequence
  Synthetic construct
PCPAPEAAGGPSVFLFPPKPKDTLMISRTPEVTCVVVDVSHEDPEVKFNWYVDGVEVHNAKTKPREEQYNSTYRVVSVLTVLHQDWLNGKEYKCKVSNKALPAPIEKTISKAKGQPREPQVYTLPPSRDELTKNQVSLSCAVKGFYPSDIAVEWESFGTEWSSYKTTPPVLDSDGSFFLVSKLTVTKEEWQQGFVFSCSVLHEALHSHYTQKSLSLSPGK

SEQ ID NO: 250 - protein, 220 aa, Artificial Sequence
  Synthetic construct
PCPAPEAAGGPSVFLFPPKPKDTLMISRTPEVTCVVVDVSHEDPEVKFNWYVDGVEVHNAKTKPREEQYNSTYRVVSVLTVLHQDWLNGKEYKCKVSNKALGAPIEKTISKAKGQPREPQVYTLPPSRDELTKNQVSLSCAVKGFYPSDIAVEWESFGTEWSSYKTTPPVLDSDGSFFLVSKLTVTKEEWQQGFVFSCSVLHEALHSHYTQKSLSLSPGK

SEQ ID NO: 251 - protein, 220 aa, Artificial Sequence
  Synthetic construct
PCPAPELLGGPSVFLFPPKPKDTLMISRTPEVTCVVVDVSHEDPEVKFNWYVDGVEVHNAKTKPREEQYNSTYRVVSVLTVLHQDWLNGKEYKCKVSNKALPAPIEKTISKAKGQPREPQVYTLPPSRDELTKNQVSLTCLVKGFYPSDIAVEWESYGTEWANYKTTPPVLDSDGSFFLYSKLTVTKEEWQQGFVFSCSVLHEALHSHYTQKSLSLSPGK

SEQ ID NO: 252 - protein, 220 aa, Artificial Sequence
  Synthetic construct
PCPAPELLGGPSVFLFPPKPKDTLMISRTPEVTCVVVDVSHEDPEVKFNWYVDGVEVHNAKTKPREEQYNSTYRVVSVLTVLHQDWLNGKEYKCKVSNKALPAPIEKTISKAKGQPREPQVYTLPPSRDELTKNQVSLWCLVKGFYPSDIAVEWESYGTEWANYKTTPPVLDSDGSFFLYSKLTVTKEEWQQGFVFSCSVLHEALHSHYTQKSLSLSPGK

SEQ ID NO: 253 - protein, 220 aa, Artificial Sequence
  Synthetic construct
PCPAPEAAGGPSVFLFPPKPKDTLMISRTPEVTCVVVDVSHEDPEVKFNWYVDGVEVHNAKTKPREEQYNSTYRVVSVLTVLHQDWLNGKEYKCKVSNKALPAPIEKTISKAKGQPREPQVYTLPPSRDELTKNQVSLWCLVKGFYPSDIAVEWESYGTEWANYKTTPPVLDSDGSFFLYSKLTVTKEEWQQGFVFSCSVLHEALHSHYTQKSLSLSPGK

SEQ ID NO: 254 - protein, 220 aa, Artificial Sequence
  Synthetic construct
PCPAPEAAGGPSVFLFPPKPKDTLMISRTPEVTCVVVDVSHEDPEVKFNWYVDGVEVHNAKTKPREEQYNSTYRVVSVLTVLHQDWLNGKEYKCKVSNKALGAPIEKTISKAKGQPREPQVYTLPPSRDELTKNQVSLWCLVKGFYPSDIAVEWESYGTEWANYKTTPPVLDSDGSFFLYSKLTVTKEEWQQGFVFSCSVLHEALHSHYTQKSLSLSPGK

SEQ ID NO: 255 - protein, 220 aa, Artificial Sequence
  Synthetic construct
PCPAPELLGGPSVFLFPPKPKDTLMISRTPEVTCVVVDVSHEDPEVKFNWYVDGVEVHNAKTKPREEQYNSTYRVVSVLTVLHQDWLNGKEYKCKVSNKALPAPIEKTISKAKGQPREPQVYTLPPSRDELTKNQVSLSCAVKGFYPSDIAVEWESYGTEWANYKTTPPVLDSDGSFFLVSKLTVTKEEWQQGFVFSCSVLHEALHSHYTQKSLSLSPGK

SEQ ID NO: 256 - protein, 220 aa, Artificial Sequence
  Synthetic construct
PCPAPEAAGGPSVFLFPPKPKDTLMISRTPEVTCVVVDVSHEDPEVKFNWYVDGVEVHNAKTKPREEQYNSTYRVVSVLTVLHQDWLNGKEYKCKVSNKALPAPIEKTISKAKGQPREPQVYTLPPSRDELTKNQVSLSCAVKGFYPSDIAVEWESYGTEWANYKTTPPVLDSDGSFFLVSKLTVTKEEWQQGFVFSCSVLHEALHSHYTQKSLSLSPGK

SEQ ID NO: 257 - protein, 220 aa, Artificial Sequence
  Synthetic construct
PCPAPEAAGGPSVFLFPPKPKDTLMISRTPEVTCVVVDVSHEDPEVKFNWYVDGVEVHNAKTKPREEQYNSTYRVVSVLTVLHQDWLNGKEYKCKVSNKALGAPIEKTISKAKGQPREPQVYTLPPSRDELTKNQVSLSCAVKGFYPSDIAVEWESYGTEWANYKTTPPVLDSDGSFFLVSKLTVTKEEWQQGFVFSCSVLHEALHSHYTQKSLSLSPGK

SEQ ID NO: 258 - protein, 220 aa, Artificial Sequence
  Synthetic construct
PCPAPELLGGPSVFLFPPKPKDTLMISRTPEVTCVVVDVSHEDPEVKFNWYVDGVEVHNAKTKPREEQYNSTYRVVSVLTVLHQDWLNGKEYKCKVSNKALPAPIEKTISKAKGQPREPQVYTLPPSRDELTKNQVSLTCLVKGFYPSDIAVEWESYGTEWVNYKTTPPVLDSDGSFFLYSKLTVTKEEWQQGFVFSCSVLHEALHSHYTQKSLSLSPGK

SEQ ID NO: 259 - protein, 220 aa, Artificial Sequence
  Synthetic construct
PCPAPELLGGPSVFLFPPKPKDTLMISRTPEVTCVVVDVSHEDPEVKFNWYVDGVEVHNAKTKPREEQYNSTYRVVSVLTVLHQDWLNGKEYKCKVSNKALPAPIEKTISKAKGQPREPQVYTLPPSRDELTKNQVSLWCLVKGFYPSDIAVEWESYGTEWVNYKTTPPVLDSDGSFFLYSKLTVTKEEWQQGFVFSCSVLHEALHSHYTQKSLSLSPGK

SEQ ID NO: 260 - protein, 220 aa, Artificial Sequence
  Synthetic construct
PCPAPEAAGGPSVFLFPPKPKDTLMISRTPEVTCVVVDVSHEDPEVKFNWYVDGVEVHNAKTKPREEQYNSTYRVVSVLTVLHQDWLNGKEYKCKVSNKALPAPIEKTISKAKGQPREPQVYTLPPSRDELTKNQVSLWCLVKGFYPSDIAVEWESYGTEWVNYKTTPPVLDSDGSFFLYSKLTVTKEEWQQGFVFSCSVLHEALHSHYTQKSLSLSPGK

SEQ ID NO: 261 - protein, 220 aa, Artificial Sequence
  Synthetic construct
PCPAPEAAGGPSVFLFPPKPKDTLMISRTPEVTCVVVDVSHEDPEVKFNWYVDGVEVHNAKTKPREEQYNSTYRVVSVLTVLHQDWLNGKEYKCKVSNKALGAPIEKTISKAKGQPREPQVYTLPPSRDELTKNQVSLWCLVKGFYPSDIAVEWESYGTEWVNYKTTPPVLDSDGSFFLYSKLTVTKEEWQQGFVFSCSVLHEALHSHYTQKSLSLSPGK

SEQ ID NO: 262 - protein, 220 aa, Artificial Sequence
  Synthetic construct
PCPAPELLGGPSVFLFPPKPKDTLMISRTPEVTCVVVDVSHEDPEVKFNWYVDGVEVHNAKTKPREEQYNSTYRVVSVLTVLHQDWLNGKEYKCKVSNKALPAPIEKTISKAKGQPREPQVYTLPPSRDELTKNQVSLSCAVKGFYPSDIAVEWESYGTEWVNYKTTPPVLDSDGSFFLVSKLTVTKEEWQQGFVFSCSVLHEALHSHYTQKSLSLSPGK

SEQ ID NO: 263 - protein, 220 aa, Artificial Sequence
  Synthetic construct
PCPAPEAAGGPSVFLFPPKPKDTLMISRTPEVTCVVVDVSHEDPEVKFNWYVDGVEVHNAKTKPREEQYNSTYRVVSVLTVLHQDWLNGKEYKCKVSNKALPAPIEKTISKAKGQPREPQVYTLPPSRDELTKNQVSLSCAVKGFYPSDIAVEWESYGTEWVNYKTTPPVLDSDGSFFLVSKLTVTKEEWQQGFVFSCSVLHEALHSHYTQKSLSLSPGK

SEQ ID NO: 264 - protein, 220 aa, Artificial Sequence
  Synthetic construct
PCPAPEAAGGPSVFLFPPKPKDTLMISRTPEVTCVVVDVSHEDPEVKFNWYVDGVEVHNAKTKPREEQYNSTYRVVSVLTVLHQDWLNGKEYKCKVSNKALGAPIEKTISKAKGQPREPQVYTLPPSRDELTKNQVSLSCAVKGFYPSDIAVEWESYGTEWVNYKTTPPVLDSDGSFFLVSKLTVTKEEWQQGFVFSCSVLHEALHSHYTQKSLSLSPGK

SEQ ID NO: 265 - protein, 220 aa, Artificial Sequence
  Synthetic construct
PCPAPELLGGPSVFLFPPKPKDTLMISRTPEVTCVVVDVSHEDPEVKFNWYVDGVEVHNAKTKPREEQYNSTYRVVSVLTVLHQDWLNGKEYKCKVSNKALPAPIEKTISKAKGQPREPQVYTLPPSRDELTKNQVSLTCLVKGFYPSDIAVEWESYGTEWSNYKTTPPVLDSDGSFFLYSKLTVSKEEWQQGFVFSCSVLHEALHSHYTQKSLSLSPGK

SEQ ID NO: 266 - protein, 220 aa, Artificial Sequence
  Synthetic construct
PCPAPELLGGPSVFLFPPKPKDTLMISRTPEVTCVVVDVSHEDPEVKFNWYVDGVEVHNAKTKPREEQYNSTYRVVSVLTVLHQDWLNGKEYKCKVSNKALPAPIEKTISKAKGQPREPQVYTLPPSRDELTKNQVSLWCLVKGFYPSDIAVEWESYGTEWSNYKTTPPVLDSDGSFFLYSKLTVSKEEWQQGFVFSCSVLHEALHSHYTQKSLSLSPGK

SEQ ID NO: 267 - protein, 220 aa, Artificial Sequence
  Synthetic construct
PCPAPEAAGGPSVFLFPPKPKDTLMISRTPEVTCVVVDVSHEDPEVKFNWYVDGVEVHNAKTKPREEQYNSTYRVVSVLTVLHQDWLNGKEYKCKVSNKALPAPIEKTISKAKGQPREPQVYTLPPSRDELTKNQVSLWCLVKGFYPSDIAVEWESYGTEWSNYKTTPPVLDSDGSFFLYSKLTVSKEEWQQGFVFSCSVLHEALHSHYTQKSLSLSPGK

SEQ ID NO: 268 - protein, 220 aa, Artificial Sequence
  Synthetic construct
PCPAPEAAGGPSVFLFPPKPKDTLMISRTPEVTCVVVDVSHEDPEVKFNWYVDGVEVHNAKTKPREEQYNSTYRVVSVLTVLHQDWLNGKEYKCKVSNKALGAPIEKTISKAKGQPREPQVYTLPPSRDELTKNQVSLWCLVKGFYPSDIAVEWESYGTEWSNYKTTPPVLDSDGSFFLYSKLTVSKEEWQQGFVFSCSVLHEALHSHYTQKSLSLSPGK

SEQ ID NO: 269 - protein, 220 aa, Artificial Sequence
  Synthetic construct
PCPAPELLGGPSVFLFPPKPKDTLMISRTPEVTCVVVDVSHEDPEVKFNWYVDGVEVHNAKTKPREEQYNSTYRVVSVLTVLHQDWLNGKEYKCKVSNKALPAPIEKTISKAKGQPREPQVYTLPPSRDELTKNQVSLSCAVKGFYPSDIAVEWESYGTEWSNYKTTPPVLDSDGSFFLVSKLTVSKEEWQQGFVFSCSVLHEALHSHYTQKSLSLSPGK

SEQ ID NO: 270 - protein, 220 aa, Artificial Sequence
  Synthetic construct
PCPAPEAAGGPSVFLFPPKPKDTLMISRTPEVTCVVVDVSHEDPEVKFNWYVDGVEVHNAKTKPREEQYNSTYRVVSVLTVLHQDWLNGKEYKCKVSNKALPAPIEKTISKAKGQPREPQVYTLPPSRDELTKNQVSLSCAVKGFYPSDIAVEWESYGTEWSNYKTTPPVLDSDGSFFLVSKLTVSKEEWQQGFVFSCSVLHEALHSHYTQKSLSLSPGK

SEQ ID NO: 271 - protein, 220 aa, Artificial Sequence
  Synthetic construct
PCPAPEAAGGPSVFLFPPKPKDTLMISRTPEVTCVVVDVSHEDPEVKFNWYVDGVEVHNAKTKPREEQYNSTYRVVSVLTVLHQDWLNGKEYKCKVSNKALGAPIEKTISKAKGQPREPQVYTLPPSRDELTKNQVSLSCAVKGFYPSDIAVEWESYGTEWSNYKTTPPVLDSDGSFFLVSKLTVSKEEWQQGFVFSCSVLHEALHSHYTQKSLSLSPGK

SEQ ID NO: 272 - protein, 220 aa, Artificial Sequence
  Synthetic construct
PCPAPELLGGPSVFLFPPKPKDTLMISRTPEVTCVVVDVSHEDPEVKFNWYVDGVEVHNAKTKPREEQYNSTYRVVSVLTVLHQDWLNGKEYKCKVSNKALPAPIEKTISKAKGQPREPQVYTLPPSRDELTKNQVSLTCLVKGFYPSDIAVLWESYGTEWASYKTTPPVLDSDGSFFLYSKLTVTKEEWQQGFVFSCSVLHEALHSHYTQKSLSLSPGK

SEQ ID NO: 273 - protein, 220 aa, Artificial Sequence
  Synthetic construct
PCPAPELLGGPSVFLFPPKPKDTLMISRTPEVTCVVVDVSHEDPEVKFNWYVDGVEVHNAKTKPREEQYNSTYRVVSVLTVLHQDWLNGKEYKCKVSNKALPAPIEKTISKAKGQPREPQVYTLPPSRDELTKNQVSLWCLVKGFYPSDIAVLWESYGTEWASYKTTPPVLDSDGSFFLYSKLTVTKEEWQQGFVFSCSVLHEALHSHYTQKSLSLSPGK

SEQ ID NO: 274 - protein, 220 aa, Artificial Sequence
  Synthetic construct
PCPAPEAAGGPSVFLFPPKPKDTLMISRTPEVTCVVVDVSHEDPEVKFNWYVDGVEVHNAKTKPREEQYNSTYRVVSVLTVLHQDWLNGKEYKCKVSNKALPAPIEKTISKAKGQPREPQVYTLPPSRDELTKNQVSLWCLVKGFYPSDIAVLWESYGTEWASYKTTPPVLDSDGSFFLYSKLTVTKEEWQQGFVFSCSVLHEALHSHYTQKSLSLSPGK

SEQ ID NO: 275 - protein, 220 aa, Artificial Sequence
  Synthetic construct
PCPAPEAAGGPSVFLFPPKPKDTLMISRTPEVTCVVVDVSHEDPEVKFNWYVDGVEVHNAKTKPREEQYNSTYRVVSVLTVLHQDWLNGKEYKCKVSNKALGAPIEKTISKAKGQPREPQVYTLPPSRDELTKNQVSLWCLVKGFYPSDIAVLWESYGTEWASYKTTPPVLDSDGSFFLYSKLTVTKEEWQQGFVFSCSVLHEALHSHYTQKSLSLSPGK

SEQ ID NO: 276 - protein, 220 aa, Artificial Sequence
  Synthetic construct
PCPAPELLGGPSVFLFPPKPKDTLMISRTPEVTCVVVDVSHEDPEVKFNWYVDGVEVHNAKTKPREEQYNSTYRVVSVLTVLHQDWLNGKEYKCKVSNKALPAPIEKTISKAKGQPREPQVYTLPPSRDELTKNQVSLSCAVKGFYPSDIAVLWESYGTEWASYKTTPPVLDSDGSFFLVSKLTVTKEEWQQGFVFSCSVLHEALHSHYTQKSLSLSPGK

SEQ ID NO: 277 - protein, 220 aa, Artificial Sequence
  Synthetic construct
PCPAPEAAGGPSVFLFPPKPKDTLMISRTPEVTCVVVDVSHEDPEVKFNWYVDGVEVHNAKTKPREEQYNSTYRVVSVLTVLHQDWLNGKEYKCKVSNKALPAPIEKTISKAKGQPREPQVYTLPPSRDELTKNQVSLSCAVKGFYPSDIAVLWESYGTEWASYKTTPPVLDSDGSFFLVSKLTVTKEEWQQGFVFSCSVLHEALHSHYTQKSLSLSPGK

SEQ ID NO: 278 - protein, 220 aa, Artificial Sequence
  Synthetic construct
PCPAPEAAGGPSVFLFPPKPKDTLMISRTPEVTCVVVDVSHEDPEVKFNWYVDGVEVHNAKTKPREEQYNSTYRVVSVLTVLHQDWLNGKEYKCKVSNKALGAPIEKTISKAKGQPREPQVYTLPPSRDELTKNQVSLSCAVKGFYPSDIAVLWESYGTEWASYKTTPPVLDSDGSFFLVSKLTVTKEEWQQGFVFSCSVLHEALHSHYTQKSLSLSPGK

SEQ ID NO: 279 - protein, 220 aa, Artificial Sequence
  Synthetic construct
PCPAPELLGGPSVFLFPPKPKDTLMISRTPEVTCVVVDVSHEDPEVKFNWYVDGVEVHNAKTKPREEQYNSTYRVVSVLTVLHQDWLNGKEYKCKVSNKALPAPIEKTISKAKGQPREPQVYTLPPSRDELTKNQVSLTCLVKGFYPSDIAVEWESYGTEWSNYKTTPPVLDSDGSFFLYSKLTVTKEEWQQGFVFSCSVLHEALHSHYTQKSLSLSPGK

SEQ ID NO: 280 - protein, 220 aa, Artificial Sequence
  Synthetic construct
PCPAPELLGGPSVFLFPPKPKDTLMISRTPEVTCVVVDVSHEDPEVKFNWYVDGVEVHNAKTKPREEQYNSTYRVVSVLTVLHQDWLNGKEYKCKVSNKALPAPIEKTISKAKGQPREPQVYTLPPSRDELTKNQVSLWCLVKGFYPSDIAVEWESYGTEWSNYKTTPPVLDSDGSFFLYSKLTVTKEEWQQGFVFSCSVLHEALHSHYTQKSLSLSPGK

SEQ ID NO: 281 - protein, 220 aa, Artificial Sequence
  Synthetic construct
PCPAPEAAGGPSVFLFPPKPKDTLMISRTPEVTCVVVDVSHEDPEVKFNWYVDGVEVHNAKTKPREEQYNSTYRVVSVLTVLHQDWLNGKEYKCKVSNKALPAPIEKTISKAKGQPREPQVYTLPPSRDELTKNQVSLWCLVKGFYPSDIAVEWESYGTEWSNYKTTPPVLDSDGSFFLYSKLTVTKEEWQQGFVFSCSVLHEALHSHYTQKSLSLSPGK

SEQ ID NO: 282 - protein, 220 aa, Artificial Sequence
  Synthetic construct
PCPAPEAAGGPSVFLFPPKPKDTLMISRTPEVTCVVVDVSHEDPEVKFNWYVDGVEVHNAKTKPREEQYNSTYRVVSVLTVLHQDWLNGKEYKCKVSNKALGAPIEKTISKAKGQPREPQVYTLPPSRDELTKNQVSLWCLVKGFYPSDIAVEWESYGTEWSNYKTTPPVLDSDGSFFLYSKLTVTKEEWQQGFVFSCSVLHEALHSHYTQKSLSLSPGK

SEQ ID NO: 283 - protein, 220 aa, Artificial Sequence
  Synthetic construct
PCPAPELLGGPSVFLFPPKPKDTLMISRTPEVTCVVVDVSHEDPEVKFNWYVDGVEVHNAKTKPREEQYNSTYRVVSVLTVLHQDWLNGKEYKCKVSNKALPAPIEKTISKAKGQPREPQVYTLPPSRDELTKNQVSLSCAVKGFYPSDIAVEWESYGTEWSNYKTTPPVLDSDGSFFLVSKLTVTKEEWQQGFVFSCSVLHEALHSHYTQKSLSLSPGK

SEQ ID NO: 284 - protein, 220 aa, Artificial Sequence
  Synthetic construct
PCPAPEAAGGPSVFLFPPKPKDTLMISRTPEVTCVVVDVSHEDPEVKFNWYVDGVEVHNAKTKPREEQYNSTYRVVSVLTVLHQDWLNGKEYKCKVSNKALPAPIEKTISKAKGQPREPQVYTLPPSRDELTKNQVSLSCAVKGFYPSDIAVEWESYGTEWSNYKTTPPVLDSDGSFFLVSKLTVTKEEWQQGFVFSCSVLHEALHSHYTQKSLSLSPGK

SEQ ID NO: 285 - protein, 220 aa, Artificial Sequence
  Synthetic construct
PCPAPEAAGGPSVFLFPPKPKDTLMISRTPEVTCVVVDVSHEDPEVKFNWYVDGVEVHNAKTKPREEQYNSTYRVVSVLTVLHQDWLNGKEYKCKVSNKALGAPIEKTISKAKGQPREPQVYTLPPSRDELTKNQVSLSCAVKGFYPSDIAVEWESYGTEWSNYKTTPPVLDSDGSFFLVSKLTVTKEEWQQGFVFSCSVLHEALHSHYTQKSLSLSPGK

SEQ ID NO: 286 - protein, 220 aa, Artificial Sequence
  Synthetic construct
PCPAPELLGGPSVFLFPPKPKDTLMISRTPEVTCVVVDVSHEDPEVKFNWYVDGVEVHNAKTKPREEQYNSTYRVVSVLTVLHQDWLNGKEYKCKVSNKALPAPIEKTISKAKGQPREPQVYTLPPSRDELTKNQVSLTCLVKGFYPSDIAVWWESYGTEWSSYKTTPPVLDSDGSFFLYSKLTVTKEEWQQGFVFSCSVLHEALHSHYTQKSLSLSPGK

SEQ ID NO: 287 - protein, 220 aa, Artificial Sequence
  Synthetic construct
PCPAPELLGGPSVFLFPPKPKDTLMISRTPEVTCVVVDVSHEDPEVKFNWYVDGVEVHNAKTKPREEQYNSTYRVVSVLTVLHQDWLNGKEYKCKVSNKALPAPIEKTISKAKGQPREPQVYTLPPSRDELTKNQVSLWCLVKGFYPSDIAVWWESYGTEWSSYKTTPPVLDSDGSFFLYSKLTVTKEEWQQGFVFSCSVLHEALHSHYTQKSLSLSPGK

SEQ ID NO: 288 - protein, 220 aa, Artificial Sequence
  Synthetic construct
PCPAPEAAGGPSVFLFPPKPKDTLMISRTPEVTCVVVDVSHEDPEVKFNWYVDGVEVHNAKTKPREEQYNSTYRVVSVLTVLHQDWLNGKEYKCKVSNKALPAPIEKTISKAKGQPREPQVYTLPPSRDELTKNQVSLWCLVKGFYPSDIAVWWESYGTEWSSYKTTPPVLDSDGSFFLYSKLTVTKEEWQQGFVFSCSVLHEALHSHYTQKSLSLSPGK

SEQ ID NO: 289 - protein, 220 aa, Artificial Sequence
  Synthetic construct
PCPAPEAAGGPSVFLFPPKPKDTLMISRTPEVTCVVVDVSHEDPEVKFNWYVDGVEVHNAKTKPREEQYNSTYRVVSVLTVLHQDWLNGKEYKCKVSNKALGAPIEKTISKAKGQPREPQVYTLPPSRDELTKNQVSLWCLVKGFYPSDIAVWWESYGTEWSSYKTTPPVLDSDGSFFLYSKLTVTKEEWQQGFVFSCSVLHEALHSHYTQKSLSLSPGK

SEQ ID NO: 290 - protein, 220 aa, Artificial Sequence
  Synthetic construct
PCPAPELLGGPSVFLFPPKPKDTLMISRTPEVTCVVVDVSHEDPEVKFNWYVDGVEVHNAKTKPREEQYNSTYRVVSVLTVLHQDWLNGKEYKCKVSNKALPAPIEKTISKAKGQPREPQVYTLPPSRDELTKNQVSLSCAVKGFYPSDIAVWWESYGTEWSSYKTTPPVLDSDGSFFLVSKLTVTKEEWQQGFVFSCSVLHEALHSHYTQKSLSLSPGK

SEQ ID NO: 291 - protein, 220 aa, Artificial Sequence
  Synthetic construct
PCPAPEAAGGPSVFLFPPKPKDTLMISRTPEVTCVVVDVSHEDPEVKFNWYVDGVEVHNAKTKPREEQYNSTYRVVSVLTVLHQDWLNGKEYKCKVSNKALPAPIEKTISKAKGQPREPQVYTLPPSRDELTKNQVSLSCAVKGFYPSDIAVWWESYGTEWSSYKTTPPVLDSDGSFFLVSKLTVTKEEWQQGFVFSCSVLHEALHSHYTQKSLSLSPGK

SEQ ID NO: 292 - protein, 220 aa, Artificial Sequence
  Synthetic construct
PCPAPEAAGGPSVFLFPPKPKDTLMISRTPEVTCVVVDVSHEDPEVKFNWYVDGVEVHNAKTKPREEQYNSTYRVVSVLTVLHQDWLNGKEYKCKVSNKALGAPIEKTISKAKGQPREPQVYTLPPSRDELTKNQVSLSCAVKGFYPSDIAVWWESYGTEWSSYKTTPPVLDSDGSFFLVSKLTVTKEEWQQGFVFSCSVLHEALHSHYTQKSLSLSPGK

SEQ ID NO: 293 - protein, 220 aa, Artificial Sequence
  Synthetic construct
PCPAPELLGGPSVFLFPPKPKDTLMISRTPEVTCVVVDVSHEDPEVKFNWYVDGVEVHNAKTKPREEQYNSTYRVVSVLTVLHQDWLNGKEYKCKVSNKALPAPIEKTISKAKGQPREPQVYTLPPSRDELTKNQVSLTCLVKGFYPSDIAVEWESFGTEWSSYKTTPPVLDSDGSFFLYSKLTVSKEEWQQGFVFSCSVLHEALHSHYTQKSLSLSPGK

SEQ ID NO: 294 - protein, 220 aa, Artificial Sequence
  Synthetic construct
PCPAPELLGGPSVFLFPPKPKDTLMISRTPEVTCVVVDVSHEDPEVKFNWYVDGVEVHNAKTKPREEQYNSTYRVVSVLTVLHQDWLNGKEYKCKVSNKALPAPIEKTISKAKGQPREPQVYTLPPSRDELTKNQVSLWCLVKGFYPSDIAVEWESFGTEWSSYKTTPPVLDSDGSFFLYSKLTVSKEEWQQGFVFSCSVLHEALHSHYTQKSLSLSPGK

SEQ ID NO: 295 - protein, 220 aa, Artificial Sequence
  Synthetic construct
PCPAPEAAGGPSVFLFPPKPKDTLMISRTPEVTCVVVDVSHEDPEVKFNWYVDGVEVHNAKTKPREEQYNSTYRVVSVLTVLHQDWLNGKEYKCKVSNKALPAPIEKTISKAKGQPREPQVYTLPPSRDELTKNQVSLWCLVKGFYPSDIAVEWESFGTEWSSYKTTPPVLDSDGSFFLYSKLTVSKEEWQQGFVFSCSVLHEALHSHYTQKSLSLSPGK

SEQ ID NO: 296 - protein, 220 aa, Artificial Sequence
  Synthetic construct
PCPAPEAAGGPSVFLFPPKPKDTLMISRTPEVTCVVVDVSHEDPEVKFNWYVDGVEVHNAKTKPREEQYNSTYRVVSVLTVLHQDWLNGKEYKCKVSNKALGAPIEKTISKAKGQPREPQVYTLPPSRDELTKNQVSLWCLVKGFYPSDIAVEWESFGTEWSSYKTTPPVLDSDGSFFLYSKLTVSKEEWQQGFVFSCSVLHEALHSHYTQKSLSLSPGK

SEQ ID NO: 297 - protein, 220 aa, Artificial Sequence
  Synthetic construct
PCPAPELLGGPSVFLFPPKPKDTLMISRTPEVTCVVVDVSHEDPEVKFNWYVDGVEVHNAKTKPREEQYNSTYRVVSVLTVLHQDWLNGKEYKCKVSNKALPAPIEKTISKAKGQPREPQVYTLPPSRDELTKNQVSLSCAVKGFYPSDIAVEWESFGTEWSSYKTTPPVLDSDGSFFLVSKLTVSKEEWQQGFVFSCSVLHEALHSHYTQKSLSLSPGK

SEQ ID NO: 298 - protein, 220 aa, Artificial Sequence
  Synthetic construct
PCPAPEAAGGPSVFLFPPKPKDTLMISRTPEVTCVVVDVSHEDPEVKFNWYVDGVEVHNAKTKPREEQYNSTYRVVSVLTVLHQDWLNGKEYKCKVSNKALPAPIEKTISKAKGQPREPQVYTLPPSRDELTKNQVSLSCAVKGFYPSDIAVEWESFGTEWSSYKTTPPVLDSDGSFFLVSKLTVSKEEWQQGFVFSCSVLHEALHSHYTQKSLSLSPGK

SEQ ID NO: 299 - protein, 220 aa, Artificial Sequence
  Synthetic construct
PCPAPEAAGGPSVFLFPPKPKDTLMISRTPEVTCVVVDVSHEDPEVKFNWYVDGVEVHNAKTKPREEQYNSTYRVVSVLTVLHQDWLNGKEYKCKVSNKALGAPIEKTISKAKGQPREPQVYTLPPSRDELTKNQVSLSCAVKGFYPSDIAVEWESFGTEWSSYKTTPPVLDSDGSFFLVSKLTVSKEEWQQGFVFSCSVLHEALHSHYTQKSLSLSPGK

SEQ ID NO: 300 - protein, 220 aa, Artificial Sequence
  Synthetic construct
PCPAPELLGGPSVFLFPPKPKDTLMISRTPEVTCVVVDVSHEDPEVKFNWYVDGVEVHNAKTKPREEQYNSTYRVVSVLTVLHQDWLNGKEYKCKVSNKALPAPIEKTISKAKGQPREPQVYTLPPSRDELTKNQVSLTCLVKGFYPSDIAVEWESYGTEWANYKTTPPVLDSDGSFFLYSKLTVSKSEWQQGFVFSCSVLHEALHSHYTQKSLSLSPGK

SEQ ID NO: 301 - protein, 220 aa, Artificial Sequence
  Synthetic construct
PCPAPELLGGPSVFLFPPKPKDTLMISRTPEVTCVVVDVSHEDPEVKFNWYVDGVEVHNAKTKPREEQYNSTYRVVSVLTVLHQDWLNGKEYKCKVSNKALPAPIEKTISKAKGQPREPQVYTLPPSRDELTKNQVSLWCLVKGFYPSDIAVEWESYGTEWANYKTTPPVLDSDGSFFLYSKLTVSKSEWQQGFVFSCSVLHEALHSHYTQKSLSLSPGK

SEQ ID NO: 302 - protein, 220 aa, Artificial Sequence
  Synthetic construct
PCPAPEAAGGPSVFLFPPKPKDTLMISRTPEVTCVVVDVSHEDPEVKFNWYVDGVEVHNAKTKPREEQYNSTYRVVSVLTVLHQDWLNGKEYKCKVSNKALPAPIEKTISKAKGQPREPQVYTLPPSRDELTKNQVSLWCLVKGFYPSDIAVEWESYGTEWANYKTTPPVLDSDGSFFLYSKLTVSKSEWQQGFVFSCSVLHEALHSHYTQKSLSLSPGK

SEQ ID NO: 303 - protein, 220 aa, Artificial Sequence
  Synthetic construct
PCPAPEAAGGPSVFLFPPKPKDTLMISRTPEVTCVVVDVSHEDPEVKFNWYVDGVEVHNAKTKPREEQYNSTYRVVSVLTVLHQDWLNGKEYKCKVSNKALGAPIEKTISKAKGQPREPQVYTLPPSRDELTKNQVSLWCLVKGFYPSDIAVEWESYGTEWANYKTTPPVLDSDGSFFLYSKLTVSKSEWQQGFVFSCSVLHEALHSHYTQKSLSLSPGK

SEQ ID NO: 304 - protein, 220 aa, Artificial Sequence
  Synthetic construct
PCPAPELLGGPSVFLFPPKPKDTLMISRTPEVTCVVVDVSHEDPEVKFNWYVDGVEVHNAKTKPREEQYNSTYRVVSVLTVLHQDWLNGKEYKCKVSNKALPAPIEKTISKAKGQPREPQVYTLPPSRDELTKNQVSLSCAVKGFYPSDIAVEWESYGTEWANYKTTPPVLDSDGSFFLVSKLTVSKSEWQQGFVFSCSVLHEALHSHYTQKSLSLSPGK

SEQ ID NO: 305 - protein, 220 aa, Artificial Sequence
  Synthetic construct
PCPAPEAAGGPSVFLFPPKPKDTLMISRTPEVTCVVVDVSHEDPEVKFNWYVDGVEVHNAKTKPREEQYNSTYRVVSVLTVLHQDWLNGKEYKCKVSNKALPAPIEKTISKAKGQPREPQVYTLPPSRDELTKNQVSLSCAVKGFYPSDIAVEWESYGTEWANYKTTPPVLDSDGSFFLVSKLTVSKSEWQQGFVFSCSVLHEALHSHYTQKSLSLSPGK

SEQ ID NO: 306 - protein, 220 aa, Artificial Sequence
  Synthetic construct
PCPAPEAAGGPSVFLFPPKPKDTLMISRTPEVTCVVVDVSHEDPEVKFNWYVDGVEVHNAKTKPREEQYNSTYRVVSVLTVLHQDWLNGKEYKCKVSNKALGAPIEKTISKAKGQPREPQVYTLPPSRDELTKNQVSLSCAVKGFYPSDIAVEWESYGTEWANYKTTPPVLDSDGSFFLVSKLTVSKSEWQQGFVFSCSVLHEALHSHYTQKSLSLSPGK

SEQ ID NO: 307 - protein, 220 aa, Artificial Sequence
  Synthetic construct
PCPAPELLGGPSVFLFPPKPKDTLMISRTPEVTCVVVDVSHEDPEVKFNWYVDGVEVHNAKTKPREEQYNSTYRVVSVLTVLHQDWLNGKEYKCKVSNKALPAPIEKTISKAKGQPREPQVYTLPPSRDELTKNQVSLTCLVKGFYPSDIAVEWESFGTEWSNYKTTPPVLDSDGSFFLYSKLTVSKEEWQQGFVFSCSVLHEALHSHYTQKSLSLSPGK

SEQ ID NO: 308 - protein, 220 aa, Artificial Sequence
  Synthetic construct
PCPAPELLGGPSVFLFPPKPKDTLMISRTPEVTCVVVDVSHEDPEVKFNWYVDGVEVHNAKTKPREEQYNSTYRVVSVLTVLHQDWLNGKEYKCKVSNKALPAPIEKTISKAKGQPREPQVYTLPPSRDELTKNQVSLWCLVKGFYPSDIAVEWESFGTEWSNYKTTPPVLDSDGSFFLYSKLTVSKEEWQQGFVFSCSVLHEALHSHYTQKSLSLSPGK

SEQ ID NO: 309 - protein, 220 aa, Artificial Sequence
  Synthetic construct
PCPAPEAAGGPSVFLFPPKPKDTLMISRTPEVTCVVVDVSHEDPEVKFNWYVDGVEVHNAKTKPREEQYNSTYRVVSVLTVLHQDWLNGKEYKCKVSNKALPAPIEKTISKAKGQPREPQVYTLPPSRDELTKNQVSLWCLVKGFYPSDIAVEWESFGTEWSNYKTTPPVLDSDGSFFLYSKLTVSKEEWQQGFVFSCSVLHEALHSHYTQKSLSLSPGK

SEQ ID NO: 310 - protein, 220 aa, Artificial Sequence
  Synthetic construct
PCPAPEAAGGPSVFLFPPKPKDTLMISRTPEVTCVVVDVSHEDPEVKFNWYVDGVEVHNAKTKPREEQYNSTYRVVSVLTVLHQDWLNGKEYKCKVSNKALGAPIEKTISKAKGQPREPQVYTLPPSRDELTKNQVSLWCLVKGFYPSDIAVEWESFGTEWSNYKTTPPVLDSDGSFFLYSKLTVSKEEWQQGFVFSCSVLHEALHSHYTQKSLSLSPGK

SEQ ID NO: 311 - protein, 220 aa, Artificial Sequence
  Synthetic construct
PCPAPELLGGPSVFLFPPKPKDTLMISRTPEVTCVVVDVSHEDPEVKFNWYVDGVEVHNAKTKPREEQYNSTYRVVSVLTVLHQDWLNGKEYKCKVSNKALPAPIEKTISKAKGQPREPQVYTLPPSRDELTKNQVSLSCAVKGFYPSDIAVEWESFGTEWSNYKTTPPVLDSDGSFFLVSKLTVSKEEWQQGFVFSCSVLHEALHSHYTQKSLSLSPGK

SEQ ID NO: 312 - protein, 220 aa, Artificial Sequence
  Synthetic construct
PCPAPEAAGGPSVFLFPPKPKDTLMISRTPEVTCVVVDVSHEDPEVKFNWYVDGVEVHNAKTKPREEQYNSTYRVVSVLTVLHQDWLNGKEYKCKVSNKALPAPIEKTISKAKGQPREPQVYTLPPSRDELTKNQVSLSCAVKGFYPSDIAVEWESFGTEWSNYKTTPPVLDSDGSFFLVSKLTVSKEEWQQGFVFSCSVLHEALHSHYTQKSLSLSPGK

SEQ ID NO: 313 - protein, 220 aa, Artificial Sequence
  Synthetic construct
PCPAPEAAGGPSVFLFPPKPKDTLMISRTPEVTCVVVDVSHEDPEVKFNWYVDGVEVHNAKTKPREEQYNSTYRVVSVLTVLHQDWLNGKEYKCKVSNKALGAPIEKTISKAKGQPREPQVYTLPPSRDELTKNQVSLSCAVKGFYPSDIAVEWESFGTEWSNYKTTPPVLDSDGSFFLVSKLTVSKEEWQQGFVFSCSVLHEALHSHYTQKSLSLSPGK

SEQ ID NO: 314 - protein, 11 aa, Artificial Sequence
  Synthetic construct
  MISC_FEATURE (1)..(1): Xaa = Glu, Leu, Ser, Val, Trp, or Tyr
  MISC_FEATURE (5)..(5): Xaa = an aromatic amino acid (e.g., Tyr, Phe, or Trp), Met, Pro, or Val
  MISC_FEATURE (7)..(7): Xaa = Thr, Asn, or Val
  MISC_FEATURE (8)..(8): Xaa = Glu, Ile, Pro, or Val
  MISC_FEATURE (10)..(10): Xaa = an aliphatic amino acid (e.g., Ala, Ile, or Val), Ser, or Thr
  MISC_FEATURE (11)..(11): Xaa = Ser, Asn, Arg, or Thr
XWESXGXXWXX

SEQ ID NO: 315 - protein, 14 aa, Artificial Sequence
  Synthetic construct
  MISC_FEATURE (1)..(1): Xaa = Thr, His, or Ser
  MISC_FEATURE (3)..(3): Xaa = Glu, Ser, Asp, Gly, Thr, Pro, Gln, or Arg
  MISC_FEATURE (4)..(4): Xaa = Glu or Arg
  MISC_FEATURE (9)..(9): Xaa = Phe, His, Lys, Tyr, or Trp
  MISC_FEATURE (12)..(12): Xaa = Ser, Thr, or Trp
  MISC_FEATURE (14)..(14): Xaa = Ser, Cys, Pro, Met, or Trp
XKXXWQQGXVFXCX

SEQ ID NO: 316 - protein, 107 aa, Artificial Sequence
  Synthetic construct
  MISC_FEATURE (40)..(40): Xaa = Glu, Leu, Ser, Val, Trp, or Tyr
  MISC_FEATURE (44)..(44): Xaa = an aromatic amino acid (e.g., Tyr, Phe, or Trp), Met, Pro, or Val
  MISC_FEATURE (46)..(46): Xaa = Thr, Asn, or Val
  MISC_FEATURE (47)..(47): Xaa = Glu, Ile, Pro, or Val
  MISC_FEATURE (49)..(49): Xaa = an aliphatic amino acid (e.g., Ala, Ile, or Val), Ser, or Thr
  MISC_FEATURE (50)..(50): Xaa = Ser, Asn, Arg, or Thr
  MISC_FEATURE (73)..(73): Xaa = Thr, His, or Ser
  MISC_FEATURE (75)..(75): Xaa = Glu, Ser, Asp, Gly, Thr, Pro, Gln, or Arg
  MISC_FEATURE (76)..(76): Xaa = Glu or Arg
  MISC_FEATURE (81)..(81): Xaa = Phe, His, Lys, Tyr, or Trp
  MISC_FEATURE (84)..(84): Xaa = Ser, Thr, or Trp
  MISC_FEATURE (86)..(86): Xaa = Ser, Cys, Pro, Met, or Trp
GQPREPQVYTLPPSRDELTKNQVSLTCLVKGFYPSDIAVXWESXGXXWXXYKTTPPVLDSDGSFFLYSKLTVXKXXWQQGXVFXCXVMHEALHNHYTQKSLSLSPGK

SEQ ID NO: 317 - protein, 11 aa, Artificial Sequence
  Synthetic construct
  MISC_FEATURE (1)..(1): Xaa = Glu, Leu, or Trp
  MISC_FEATURE (5)..(5): Xaa = an aromatic amino acid (e.g., Tyr or Phe)
  MISC_FEATURE (10)..(10): Xaa = an aliphatic amino acid (e.g., Ala or Val) or Ser
  MISC_FEATURE (11)..(11): Xaa = Ser or Asn
XWESXGTEWXX

SEQ ID NO: 318 - protein, 14 aa, Artificial Sequence
  Synthetic construct
  MISC_FEATURE (1)..(1): Xaa = Thr or Ser
  MISC_FEATURE (3)..(3): Xaa = Glu or Ser
  MISC_FEATURE (9)..(9): Xaa = Phe, His, Tyr, or Trp
XKXEWQQGXVFSCS

SEQ ID NO: 319 - protein, 107 aa, Artificial Sequence
  Synthetic construct
  MISC_FEATURE (40)..(40): Xaa = Glu, Leu, or Trp
  MISC_FEATURE (44)..(44): Xaa = an aromatic amino acid (e.g., Tyr or Phe)
  MISC_FEATURE (49)..(49): Xaa = an aliphatic amino acid (e.g., Ala or Val) or Ser
  MISC_FEATURE (50)..(50): Xaa = Ser or Asn
  MISC_FEATURE (73)..(73): Xaa = Thr or Ser
  MISC_FEATURE (75)..(75): Xaa = Glu or Ser
  MISC_FEATURE (81)..(81): Xaa = Phe, His, Tyr, or Trp
GQPREPQVYTLPPSRDELTKNQVSLTCLVKGFYPSDIAVXWESXGTEWXXYKTTPPVLDSDGSFFLYSKLTVXKXEWQQGXVFSCSVMHEALHNHYTQKSLSLSPGK

SEQ ID NO: 320 - protein, 11 aa, Artificial Sequence
  Synthetic construct
  MISC_FEATURE (1)..(1): Xaa = Glu, Leu, or Trp
  MISC_FEATURE (5)..(5): Xaa = Tyr or Phe
  MISC_FEATURE (10)..(10): Xaa = Ser, Ala or Val
  MISC_FEATURE (11)..(11): Xaa = Ser or Asn
XWESXGTEWXX

SEQ ID NO: 321 - protein, 14 aa, Artificial Sequence
  Synthetic construct
  MISC_FEATURE (1)..(1): Xaa = Thr or Ser
  MISC_FEATURE (3)..(3): Xaa = Glu or Ser
XKXEWQQGFVFSCS

SEQ ID NO: 322 - protein, 107 aa, Artificial Sequence
  Synthetic construct
  MISC_FEATURE (40)..(40): Xaa = Glu, Leu, or Trp
  MISC_FEATURE (44)..(44): Xaa = Tyr or Phe
  MISC_FEATURE (49)..(49): Xaa = Ser, Ala or Val
  MISC_FEATURE (50)..(50): Xaa = Ser or Asn
  MISC_FEATURE (73)..(73): Xaa = Thr or Ser
  MISC_FEATURE (75)..(75): Xaa = Glu or Ser
GQPREPQVYTLPPSRDELTKNQVSLTCLVKGFYPSDIAVXWESXGTEWXXYKTTPPVLDSDGSFFLYSKLTVXKXEWQQGFVFSCSVMHEALHNHYTQKSLSLSPGK

SEQ ID NO: 323 - protein, 107 aa, Artificial Sequence
  Synthetic construct
  MISC_FEATURE (40)..(40): Xaa = Glu, Leu, Ser, Val, Trp, or Tyr
GQPREPQVYTLPPSRDELTKNQVSLTCLVKGFYPSDIAVXWESYGTEWSSYKTTPPVLDSDGSFFLYSKLTVTKEEWQQGFVFSCSVMHEALHNHYTQKSLSLSPGK

SEQ ID NO: 324 - protein, 107 aa, Artificial Sequence
  Synthetic construct
  MISC_FEATURE (44)..(44): Xaa = Tyr, Phe, Met, Pro, Val, or Trp
GQPREPQVYTLPPSRDELTKNQVSLTCLVKGFYPSDIAVWWESXGTEWSSYKTTPPVLDSDGSFFLYSKLTVTKEEWQQGFVFSCSVMHEALHNHYTQKSLSLSPGK

SEQ ID NO: 325 - protein, 107 aa, Artificial Sequence
  Synthetic construct
  MISC_FEATURE (46)..(46): Xaa = Thr, Asn, or Val
GQPREPQVYTLPPSRDELTKNQVSLTCLVKGFYPSDIAVWWESYGXEWSSYKTTPPVLDSDGSFFLYSKLTVTKEEWQQGFVFSCSVMHEALHNHYTQKSLSLSPGK

SEQ ID NO: 326 - protein, 107 aa, Artificial Sequence
  Synthetic construct
  MISC_FEATURE (47)..(47): Xaa = Glu, Ile, Pro, or Val
GQPREPQVYTLPPSRDELTKNQVSLTCLVKGFYPSDIAVWWESYGTXWSSYKTTPPVLDSDGSFFLYSKLTVTKEEWQQGFVFSCSVMHEALHNHYTQKSLSLSPGK

SEQ ID NO: 327 - protein, 107 aa, Artificial Sequence
  Synthetic construct
  MISC_FEATURE (49)..(49): Xaa = Ser, Ala, Ile, Thr, or Val
GQPREPQVYTLPPSRDELTKNQVSLTCLVKGFYPSDIAVWWESYGTEWXSYKTTPPVLDSDGSFFLYSKLTVTKEEWQQGFVFSCSVMHEALHNHYTQKSLSLSPGK

SEQ ID NO: 328 - protein, 107 aa, Artificial Sequence
  Synthetic construct
  MISC_FEATURE (50)..(50): Xaa = Ser, Asn, Arg, or Thr
GQPREPQVYTLPPSRDELTKNQVSLTCLVKGFYPSDIAVWWESYGTEWSXYKTTPPVLDSDGSFFLYSKLTVTKEEWQQGFVFSCSVMHEALHNHYTQKSLSLSPGK

SEQ ID NO: 329 - protein, 107 aa, Artificial Sequence
  Synthetic construct
  MISC_FEATURE (73)..(73): Xaa = Thr, His, or Ser
GQPREPQVYTLPPSRDELTKNQVSLTCLVKGFYPSDIAVWWESYGTEWSSYKTTPPVLDSDGSFFLYSKLTVXKEEWQQGFVFSCSVMHEALHNHYTQKSLSLSPGK

SEQ ID NO: 330 - protein, 107 aa, Artificial Sequence
  Synthetic construct
  MISC_FEATURE (75)..(75): Xaa = Glu, Ser, Asp, Gly, Thr, Pro, Gln, or Arg
GQPREPQVYTLPPSRDELTKNQVSLTCLVKGFYPSDIAVWWESYGTEWSSYKTTPPVLDSDGSFFLYSKLTVTKXEWQQGFVFSCSVMHEALHNHYTQKSLSLSPGK

SEQ ID NO: 331 - protein, 107 aa, Artificial Sequence
  Synthetic construct
  MISC_FEATURE (76)..(76): Xaa = Glu or Arg
GQPREPQVYTLPPSRDELTKNQVSLTCLVKGFYPSDIAVWWESYGTEWSSYKTTPPVLDSDGSFFLYSKLTVTKEXWQQGFVFSCSVMHEALHNHYTQKSLSLSPGK

SEQ ID NO: 332 - protein, 107 aa, Artificial Sequence
  Synthetic construct
  MISC_FEATURE (81)..(81): Xaa = Phe, His, Lys, or Tyr
GQPREPQVYTLPPSRDELTKNQVSLTCLVKGFYPSDIAVWWESYGTEWSSYKTTPPVLDSDGSFFLYSKLTVTKEEWQQGXVFSCSVMHEALHNHYTQKSLSLSPGK

SEQ ID NO: 333 - protein, 107 aa, Artificial Sequence
  Synthetic construct
  MISC_FEATURE (84)..(84): Xaa = Ser, Thr, or Trp
GQPREPQVYTLPPSRDELTKNQVSLTCLVKGFYPSDIAVWWESYGTEWSSYKTTPPVLDSDGSFFLYSKLTVTKEEWQQGFVFXCSVMHEALHNHYTQKSLSLSPGK

SEQ ID NO: 334 - protein, 107 aa, Artificial Sequence
  Synthetic construct
  MISC_FEATURE (86)..(86): Xaa = Ser, Cys, Pro, Met, or Trp
GQPREPQVYTLPPSRDELTKNQVSLTCLVKGFYPSDIAVWWESYGTEWSSYKTTPPVLDSDGSFFLYSKLTVTKEEWQQGFVFSCXVMHEALHNHYTQKSLSLSPGK

SEQ ID NO: 335 - protein, 12 aa, Artificial Sequence
  Synthetic construct
  MISC_FEATURE (1)..(1): Xaa = Glu or Trp
  MISC_FEATURE (5)..(5): Xaa = Val, Trp, Leu, or Tyr
  MISC_FEATURE (7)..(7): Xaa = Leu, Pro, Phe, Thr, or His
  MISC_FEATURE (8)..(8): Xaa = Pro, Val, or Glu
  MISC_FEATURE (10)..(10): Xaa = Ala, Ser, Val, or Gly
  MISC_FEATURE (11)..(11): Xaa = Leu, His, Gln, Gly, Val, Ala, Asn, Asp, Thr, or Glu
  MISC_FEATURE (12)..(12): Xaa = Thr, Phe, Gln, Val, or Tyr
XWESXGXXWXXX

SEQ ID NO: 336 - protein, 9 aa, Artificial Sequence
  Synthetic construct
  MISC_FEATURE (1)..(1): Xaa = Leu, Ser, Glu, Ala, or Pro
  MISC_FEATURE (4)..(4): Xaa = Glu, Asp, Thr, or Asn
  MISC_FEATURE (9)..(9): Xaa = Trp, Tyr, His, or Phe
XKSXWQQGX

SEQ ID NO: 337 - protein, 107 aa, Artificial Sequence
  Synthetic construct
  MISC_FEATURE (40)..(40): Xaa = Glu or Trp
  MISC_FEATURE (44)..(44): Xaa = Val, Trp, Leu, or Tyr
  MISC_FEATURE (46)..(46): Xaa = Leu, Pro, Phe, Thr, or His
  MISC_FEATURE (47)..(47): Xaa = Pro, Val, or Glu
  MISC_FEATURE (49)..(49): Xaa = Ala, Ser, Val, or Gly
  MISC_FEATURE (50)..(50): Xaa = Leu, His, Gln, Gly, Val, Ala, Asn, Asp, Thr, or Glu
  MISC_FEATURE (51)..(51): Xaa = Thr, Phe, Gln, Val, or Tyr
  MISC_FEATURE (73)..(73): Xaa = Leu, Ser, Glu, Ala, or Pro
  MISC_FEATURE (76)..(76): Xaa = Glu, Asp, Thr, or Asn
  MISC_FEATURE (81)..(81): Xaa = Trp, Tyr, His, or Phe
GQPREPQVYTLPPSRDELTKNQVSLTCLVKGFYPSDIAVXWESXGXXWXXXKTTPPVLDSDGSFFLYSKLTVXKSXWQQGXVFSCSVMHEALHNHYTQKSLSLSPGK

SEQ ID NO: 338 - protein, 12 aa, Artificial Sequence
  Synthetic construct
  MISC_FEATURE (1)..(1): Xaa = Glu or Trp
  MISC_FEATURE (5)..(5): Xaa = Trp, Leu, or Tyr
  MISC_FEATURE (7)..(7): Xaa = Thr or His
  MISC_FEATURE (10)..(10): Xaa = Ala, Ser, or Val
  MISC_FEATURE (11)..(11): Xaa = Val, Thr, or Asn
  MISC_FEATURE (12)..(12): Xaa = Tyr or Gln
XWESXGXVWXXX

SEQ ID NO: 339 - protein, 9 aa, Artificial Sequence
  Synthetic construct
  MISC_FEATURE (4)..(4): Xaa = Thr or Asn
  MISC_FEATURE (9)..(9): Xaa = Trp, Tyr, His, or Phe
PKSXWQQGX

SEQ ID NO: 340 - protein, 107 aa, Artificial Sequence
  Synthetic construct
  MISC_FEATURE (40)..(40): Xaa = Glu or Trp
  MISC_FEATURE (44)..(44): Xaa = Trp, Leu, or Tyr
  MISC_FEATURE (46)..(46): Xaa = Thr or His
  MISC_FEATURE (49)..(49): Xaa = Ala, Ser, or Val
  MISC_FEATURE (50)..(50): Xaa = Val, Thr, or Asn
  MISC_FEATURE (51)..(51): Xaa = Tyr or Gln
  MISC_FEATURE (76)..(76): Xaa = Thr or Asn
  MISC_FEATURE (81)..(81): Xaa = Trp, Tyr, His, or Phe
GQPREPQVYTLPPSRDELTKNQVSLTCLVKGFYPSDIAVXWESXGXVWXXXKTTPPVLDSDGSFFLYSKLTVPKSXWQQGXVFSCSVMHEALHNHYTQKSLSLSPGK

SEQ ID NO: 341 - protein, 5 aa, Artificial Sequence
  Synthetic construct
  misc_feature (2)..(2): Xaa can be any naturally occurring amino acid
  misc_feature (5)..(5): Xaa can be any naturally occurring amino acid
TXWSX

SEQ ID NO: 342 - protein, 181 aa, Artificial Sequence
  Synthetic construct
  MISC_FEATURE (97)..(97): Xaa = Asp or Glu
NSVIIVDKNGRLVYLVENPGGYVAYSKAATVTGKLVHANFGTKKDFEDLDSPVNGSIVIVRAGKITFAEKVANAESLNAIGVLIYMDQTKFPIVNAXLSFFGHAHLGTGDPYTPGFPSFNHTQFPPSRSSGLPNIPVQTISRAAAEKLFGNMEGDCPSDWKTDSTCRMVTSENKNVKLTVS

SEQ ID NO: 343 - protein, 330 aa, Homo sapiens [sequence omitted]

SEQ ID NO: 344 - protein, 326 aa, Homo sapiens
ASTKGPSVFPLAPCSRSTSESTAALGCLVKDYFPEPVTVSWNSGALTSGVHTFPAVLQSSGLYSLSSVVTVPSSNFGTQTYTCNVDHKPSNTKVDKTVERKCCVECPPCPAPPVAGPSVFLFPPKPKDTLMISRTPEVTCVVVDVSHEDPEVQFNWYVDGVEVHNAKTKPREEQFNSTFRVVSVLTVVHQDWLNGKEYKCKVSNKGLPAPIEKTISKTKGQPREPQVYTLPPSREEMTKNQVSLTCLVKGFYPSDISVEWESNGQPENNYKTTPPMLDSDGSFFLYSKLTVDKSRWQQGNVFSCSVMHEALHNHYTQKSLSLSPGK

SEQ ID NO: 345 - protein, 377 aa, Homo sapiens
ASTKGPSVFPLAPCSRSTSGGTAALGCLVKDYFPEPVTVSWNSGALTSGVHTFPAVLQSSGLYSLSSVVTVPSSSLGTQTYTCNVNHKPSNTKVDKRVELKTPLGDTTHTCPRCPEPKSCDTPPPCPRCPEPKSCDTPPPCPRCPEPKSCDTPPPCPRCPAPELLGGPSVFLFPPKPKDTLMISRTPEVTCVVVDVSHEDPEVQFKWYVDGVEVHNAKTKPREEQYNSTFRVVSVLTVLHQDWLNGKEYKCKVSNKALPAPIEKTISKTKGQPREPQVYTLPPSREEMTKNQVSLTCLVKGFYPSDIAVEWESSGQPENNYNTTPPMLDSDGSFFLYSKLTVDKSRWQQGNIFSCSVMHEALHNRFTQKSLSLSPGK

SEQ ID NO: 346 - protein, 327 aa, Homo sapiens
ASTKGPSVFPLAPCSRSTSESTAALGCLVKDYFPEPVTVSWNSGALTSGVHTFPAVLQSSGLYSLSSVVTVPSSSLGTKTYTCNVDHKPSNTKVDKRVESKYGPPCPSCPAPEFLGGPSVFLFPPKPKDTLMISRTPEVTCVVVDVSQEDPEVQFNWYVDGVEVHNAKTKPREEQFNSTYRVVSVLTVLHQDWLNGKEYKCKVSNKGLPSSIEKTISKAKGQPREPQVYTLPPSQEEMTKNQVSLTCLVKGFYPSDIAVEWESNGQPENNYKTTPPVLDSDGSFFLYSRLTVDKSRWQEGNVFSCSVMHEALHNHYTQKSLSLSLGK

SEQ ID NO: 347 - protein, 217 aa, Artificial Sequence
  Synthetic construct
  MISC_FEATURE (154)..(154): Xaa = Phe or Tyr
  MISC_FEATURE (159)..(159): Xaa = Ser, Ala, or Val
  MISC_FEATURE (183)..(183): Xaa = Ser or Thr
  MISC_FEATURE (198)..(198): Xaa = Met or Leu
  MISC_FEATURE (204)..(204): Xaa = Asn or Ser
APEAAGGPSVFLFPPKPKDTLMISRTPEVTCVVVDVSHEDPEVKFNWYVDGVEVHNAKTKPREEQYNSTYRVVSVLTVLHQDWLNGKEYKCKVSNKALPAPIEKTISKAKGQPREPQVYTLPPSRDELTKNQVSLWCLVKGFYPSDIAVEWESXGTEWXNYKTTPPVLDSDGSFFLYSKLTVXKEEWQQGFVFSCSVXHEALHXHYTQKSLSLSPGK

SEQ ID NO: 348 - protein, 217 aa, Artificial Sequence
  Synthetic construct
  MISC_FEATURE (154)..(154): Xaa = Phe or Tyr
  MISC_FEATURE (159)..(159): Xaa = Ser, Ala, or Val
  MISC_FEATURE (183)..(183): Xaa = Ser or Thr
  MISC_FEATURE (198)..(198): Xaa = Met or Leu
  MISC_FEATURE (204)..(204): Xaa = Asn or Ser
APEAAGGPSVFLFPPKPKDTLMISRTPEVTCVVVDVSHEDPEVKFNWYVDGVEVHNAKTKPREEQYNSTYRVVSVLTVLHQDWLNGKEYKCKVSNKALPAPIEKTISKAKGQPREPQVYTLPPSRDELTKNQVSLSCAVKGFYPSDIAVEWESXGTEWXNYKTTPPVLDSDGSFFLVSKLTVXKEEWQQGFVFSCSVXHEALHXHYTQKSLSLSPGK

SEQ ID NO: 349 - protein, 217 aa, Artificial Sequence
  Synthetic construct
  MISC_FEATURE (198)..(198): Xaa - Met or Leu
  MISC_FEATURE (204)..(204): Xaa - Asn or Ser
APEAAGGPSVFLFPPKPKDTLMISRTPEVTCVVVDVSHEDPEVKFNWYVDGVEVHNAKTKPREEQYNSTYRVVSVLTVLHQDWLNGKEYKCKVSNKALPAPIEKTISKAKGQPREPQVYTLPPSRDELTKNQVSLWCLVKGFYPSDIAVEWESNGQPENNYKTTPPVLDSDGSFFLYSKLTVDKSRWQQGNVFSCSVXHEALHXHYTQKSLSLSPGK

SEQ ID NO: 350 - protein, 217 aa, Artificial Sequence
  Synthetic construct
  MISC_FEATURE (198)..(198): Xaa = Met or Leu
  MISC_FEATURE (204)..(204): Xaa = Asn or Ser
APEAAGGPSVFLFPPKPKDTLMISRTPEVTCVVVDVSHEDPEVKFNWYVDGVEVHNAKTKPREEQYNSTYRVVSVLTVLHQDWLNGKEYKCKVSNKALPAPIEKTISKAKGQPREPQVYTLPPSRDELTKNQVSLSCAVKGFYPSDIAVEWESNGQPENNYKTTPPVLDSDGSFFLVSKLTVDKSRWQQGNVFSCSVXHEALHXHYTQKSLSLSPGK

SEQ ID NO: 351 - protein, 217 aa, Artificial Sequence
  Synthetic construct
APELLGGPSVFLFPPKPKDTLMISRTPEVTCVVVDVSHEDPEVKFNWYVDGVEVHNAKTKPREEQYNSTYRVVSVLTVLHQDWLNGKEYKCKVSNKALPAPIEKTISKAKGQPREPQVYTLPPSRDELTKNQVSLWCLVKGFYPSDIAVEWESNGQPENNYKTTPPVLDSDGSFFLYSKLTVDKSRWQQGNVFSCSVMHEALHNHYTQKSLSLSPGK

SEQ ID NO: 352 - protein, 217 aa, Artificial Sequence
  Synthetic construct
APEAAGGPSVFLFPPKPKDTLMISRTPEVTCVVVDVSHEDPEVKFNWYVDGVEVHNAKTKPREEQYNSTYRVVSVLTVLHQDWLNGKEYKCKVSNKALPAPIEKTISKAKGQPREPQVYTLPPSRDELTKNQVSLWCLVKGFYPSDIAVEWESNGQPENNYKTTPPVLDSDGSFFLYSKLTVDKSRWQQGNVFSCSVMHEALHNHYTQKSLSLSPGK

SEQ ID NO: 353 - protein, 217 aa, Artificial Sequence
  Synthetic construct
APEAAGGPSVFLFPPKPKDTLMISRTPEVTCVVVDVSHEDPEVKFNWYVDGVEVHNAKTKPREEQYNSTYRVVSVLTVLHQDWLNGKEYKCKVSNKALPAPIEKTISKAKGQPREPQVYTLPPSRDELTKNQVSLWCLVKGFYPSDIAVEWESNGQPENNYKTTPPVLDSDGSFFLYSKLTVDKSRWQQGNVFSCSVLHEALHSHYTQKSLSLSPGK

SEQ ID NO: 354 - protein, 217 aa, Artificial Sequence
  Synthetic construct
APELLGGPSVFLFPPKPKDTLMISRTPEVTCVVVDVSHEDPEVKFNWYVDGVEVHNAKTKPREEQYNSTYRVVSVLTVLHQDWLNGKEYKCKVSNKALPAPIEKTISKAKGQPREPQVYTLPPSRDELTKNQVSLSCAVKGFYPSDIAVEWESNGQPENNYKTTPPVLDSDGSFFLVSKLTVDKSRWQQGNVFSCSVMHEALHNHYTQKSLSLSPGK

SEQ ID NO: 355 - protein, 217 aa, Artificial Sequence
  Synthetic construct
APEAAGGPSVFLFPPKPKDTLMISRTPEVTCVVVDVSHEDPEVKFNWYVDGVEVHNAKTKPREEQYNSTYRVVSVLTVLHQDWLNGKEYKCKVSNKALPAPIEKTISKAKGQPREPQVYTLPPSRDELTKNQVSLSCAVKGFYPSDIAVEWESNGQPENNYKTTPPVLDSDGSFFLVSKLTVDKSRWQQGNVFSCSVMHEALHNHYTQKSLSLSPGK

SEQ ID NO: 356 - protein, 217 aa, Artificial Sequence
  Synthetic construct
APEAAGGPSVFLFPPKPKDTLMISRTPEVTCVVVDVSHEDPEVKFNWYVDGVEVHNAKTKPREEQYNSTYRVVSVLTVLHQDWLNGKEYKCKVSNKALPAPIEKTISKAKGQPREPQVYTLPPSRDELTKNQVSLSCAVKGFYPSDIAVEWESNGQPENNYKTTPPVLDSDGSFFLVSKLTVDKSRWQQGNVFSCSVLHEALHSHYTQKSLSLSPGK
